(19) United States
(12) Patent Application Publication
(10) Pub. No.: US 2003/0087250 A1
(43) Pub. Date: May 8, 2003

(54) Nucleic acid molecules and proteins for the identification, assessment, prevention, and therapy of ovarian cancer

(75) Inventors: John E. Monahan, Walpole, MA (US); Manjula Gannavarapu, Acton, MA (US); Sebastian Hoersch, Arlington, MA (US); Shubhangi Kamatkar, Newton, MA (US); Steven G. Kovats, Wilmington, MA (US); Rachel E. Meyers, Newton, MA (US); Michael P. Morrisey, Brighton, MA (US); Peter J. Olandt, Watertown, MA (US); Ami Sen, Framingham, MA (US); Petter Ole Veiby, Westborough, MA (US); Gordon B. Mills, Houston, TX (US); Robert C. Bast JR., Houston, TX (US); Karen Lu, Houston, TX (US); Rosemarie E. Schmandt, Houston, TX (US); Xumei Zhao, Wayland, MA (US); Karen Glatt, Natick, MA (US)

Correspondence Address: LAHIVE & COCKFIELD, 28 STATE STREET, BOSTON, MA, 02109, US

(73) Assignee: Millennium Pharmaceuticals, Inc., Cambridge, MA (US)

(21) Appl. No.: 10/097,340

(22) Filed: Mar. 14, 2002

Related U.S. Application Data
(60) Provisional application No. 60/276,025, filed on Sep. 25, 2001.
(60) Provisional application No. 60/325,149, filed on Sep. 26, 2001.
(60) Provisional application No. 60/276,026, filed on Mar. 14, 2001.
(60) Provisional application No. 60/324,967, filed on Sep. 26, 2001.
(60) Provisional application No. 60/311,732, filed on Aug. 10, 2001.
(60) Provisional application No. 60/325,102, filed on Sep. 26, 2001.
(60) Provisional application No. 60/323,580, filed on Sep. 19, 2001.

(51) Int. Cl. C12Q 1/68; G01N 33/574

(52) U.S. Cl. 435/6; 435/7.23

(57) ABSTRACT

The invention relates to newly discovered nucleic acid molecules and proteins associated with ovarian cancer. Compositions, kits, and methods for detecting, characterizing, preventing, and treating human ovarian cancers are provided.

### RELATED APPLICATIONS

[0001] The present application claims priority from U.S. provisional patent application serial No. 60/276,025, filed on Mar. 14, 2001, which was abandoned on Sep. 25, 2001, and from U.S. provisional patent application serial No. 60/325,149, filed on Sep. 26, 2001. The present application also claims priority from U.S. provisional patent application serial No. 60/276,026, filed on Mar. 14, 2001, which was abandoned on Sep. 25, 2001, and from U.S. provisional patent application serial No. 60/324,967, filed Sep. 26, 2001. The present application additionally claims priority from U.S. provisional patent application serial No. 60/311,732, filed Aug. 10, 2001, which was abandoned on Sep. 25, 2001, and from U.S. provisional patent application serial No. 60/325,102, filed Sep. 26, 2001. The present application also claims priority from U.S. provisional patent application serial No. 60/323,580, filed Sep. 19, 2001. All of the above applications are expressly incorporated by reference.

### FIELD OF THE INVENTION

[0002] The field of the invention is ovarian cancer, including diagnosis, characterization, management, and therapy of ovarian cancer.

### BACKGROUND OF THE INVENTION

[0003] Ovarian cancer is responsible for significant morbidity and mortality in populations around the world. Ovarian cancer is classified, on the basis of clinical and pathological features, in three groups, namely epithelial ovarian cancer (EOC; >90% of ovarian cancer in Western countries), germ cell tumors (circa 2-3% of ovarian cancer), and stromal ovarian cancer (circa 5% of ovarian cancer; Ozols et al., 1997, Cancer Principles and Practice of Oncology, 5th ed., DeVita et al., Eds. pp. 1502). Relative to EOC, germ cell tumors and stromal ovarian cancers are more easily detected and treated at an early stage, translating into higher/better survival rates for patients afflicted with these two types of ovarian cancer.

[0004] There are numerous types of ovarian tumors, some of which are benign, and others of which are malignant. Treatment (including non-treatment) options and predictions of patient outcome depend on accurate classification of the ovarian cancer. Ovarian cancers are named according to the type of cells from which the cancer is derived and whether the ovarian cancer is benign or malignant. Recognized histological tumor types include, for example, serous, mucinous, endometrioid, and clear cell tumors. In addition, ovarian cancers are classified according to recognized grade and stage scales.

[0005] In grade I, the tumor tissue is well differentiated. In grade II, tumor tissue is moderately well differentiated. In grade III, the tumor tissue is poorly differentiated. This grade correlates with a less favorable prognosis than grades I and II. Stage I is generally confined within the capsule surrounding one (stage IA) or both (stage IB) ovaries, although in some stage I (i.e. stage IC) cancers, malignant cells may be detected in ascites, in peritoneal rinse fluid, or on the surface of the ovaries. Stage II involves extension or metastasis of the tumor from one or both ovaries to other pelvic structures. In stage IIA, the tumor extends or has metastasized to the uterus, the fallopian tubes, or both. Stage IIB involves extension of the tumor to the pelvis. Stage IIC is stage IIA or IIB in which malignant cells may be detected in ascites, in peritoneal rinse fluid, or on the surface of the ovaries. In stage III, the tumor comprises at least one malignant extension to the small bowel or the omentum, has formed extrapelvic peritoneal implants of microscopic (stage IIIA) or macroscopic (<2 centimeter diameter, stage IIIB; >2 centimeter diameter, stage IIIC) size, or has metastasized to a retroperitoneal or inguinal lymph node (an alternate indicator of stage IIIC). In stage IV, distant (i.e. non-peritoneal) metastases of the tumor can be detected.

[0006] The durations of the various stages of ovarian cancer are not presently known, but are believed to be at least about a year each (Richart et al., 1969, Am. J Obstet. Gynecol. 105:386). Prognosis declines with increasing stage designation. For example, 5-year survival rates for patients diagnosed with stage I, II, III, and IV ovarian cancer are 80%, 57%, 25%, and 8%, respectively.

[0007] Despite being the third most prevalent gynecological cancer, ovarian cancer is the leading cause of death among those afflicted with gynecological cancers. The disproportionate mortality of ovarian cancer is attributable to a substantial absence of symptoms among those afflicted with early-stage ovarian cancer and to difficulty diagnosing ovarian cancer at an early stage. Patients afflicted with ovarian cancer most often present with non-specific complaints, such as abnormal vaginal bleeding, gastrointestinal symptoms, urinary tract symptoms, lower abdominal pain, and generalized abdominal distension. These patients rarely present with paraneoplastic symptoms or with symptoms which clearly indicate their affliction. Presently, less than about 40% of patients afflicted with ovarian cancer present with stage I or stage II. Management of ovarian cancer would be significantly enhanced if the disease could be detected at an earlier stage, when treatments are much more generally efficacious.

[0008] Ovarian cancer may be diagnosed, in part, by collecting a routine medical history from a patient and by performing physical examination, x-ray examination, and chemical and hematological studies on the patient. Hematological tests which may be indicative of ovarian cancer in a patient include analyses of serum levels of proteins designated CA125 and DF3 and plasma levels of lysophosphatidic acid (LPA). Palpation of the ovaries and ultrasound techniques (particularly including endovaginal ultrasound and color Doppler flow ultrasound techniques) can aid detection of ovarian tumors and differentiation of ovarian cancer from benign ovarian cysts. However, a definitive diagnosis of ovarian cancer typically requires performing exploratory laparotomy of the patient.

[0009] Potential tests for the detection of ovarian cancer (e.g., screening, reflex or monitoring) may be characterized by a number of factors. The “sensitivity” of an assay refers to the probability that the test will yield a positive result in an individual afflicted with ovarian cancer. The “specificity” of an assay refers to the probability that the test will yield a negative result in an individual not afflicted with ovarian cancer. The “positive predictive value” (PPV) of an assay is the ratio of true positive results (i.e. positive assay results for patients afflicted with ovarian cancer) to all positive results (i.e. positive assay results for patients afflicted with ovarian cancer+positive assay results for patients not afflicted with ovarian cancer). It has been estimated that in order for an assay to be an appropriate population-wide screening tool for ovarian cancer the assay must have a PPV of at least about 10% (Rosenthal et al., 1998, Sem. Oncol. 25:315-325). It would thus be desirable for a screening assay for detecting ovarian cancer in patients to have a high sensitivity and a high PPV. Monitoring and reflex tests would also require appropriate specifications.

[0010] Owing to the cost, limited sensitivity, and limited specificity of known methods of detecting ovarian cancer, screening is not presently performed for the general population. In addition, the need to perform laparotomy in order to diagnose ovarian cancer in patients who screen positive for indications of ovarian cancer limits the desirability of population-wide screening, such that a PPV even greater than 10% would be desirable.

[0011] Prior use of serum CA125 level as a diagnostic marker for ovarian cancer indicated that this method exhibited insufficient specificity for use as a general screening method. Use of a refined algorithm for interpreting CA125 levels in serial retrospective samples obtained from patients improved the specificity of the method without shifting detection of ovarian cancer to an earlier stage (Skakes, 1995, Cancer 76:2004). Screening for LPA to detect gynecological cancers including ovarian cancer exhibited a sensitivity of about 96% and a specificity of about 89%. However, CA125-based screening methods and LPA-based screening methods are hampered by the presence of CA125 and LPA, respectively, in the serum of patients afflicted with conditions other than ovarian cancer. For example, serum CA125 levels are known to be associated with menstruation, pregnancy, gastrointestinal and hepatic conditions such as colitis and cirrhosis, pericarditis, renal disease, and various non-ovarian malignancies. Serum LPA is known, for example, to be affected by the presence of non-ovarian gynecological malignancies. A screening method having a greater specificity for ovarian cancer than the current screening methods for CA125 and LPA could provide a population-wide screening for early stage ovarian cancer.

[0012] Presently greater than about 60% of ovarian cancers diagnosed in patients are stage III or stage IV cancers. Treatment at these stages is largely limited to cytoreductive surgery (when feasible) and chemotherapy, both of which aim to slow the spread and development of metastasized tumor. Substantially all late stage ovarian cancer patients currently undergo combination chemotherapy as primary treatment, usually a combination of a platinum compound and a taxane. Median survival for responding patients is about one year. Combination chemotherapy involving agents such as doxorubicin, cyclophosphamide, cisplatin, hexamethylmelamine, paclitaxel, and methotrexate may improve survival rates in these groups, relative to single-agent therapies. Various recently-developed chemotherapeutic agents and treatment regimens have also demonstrated usefulness for treatment of advanced ovarian cancer. For example, use of the topoisomerase I inhibitor topectan, use of amifostine to minimize chemotherapeutic side effects, and use of intraperitoneal chemotherapy for patients having peritoneally implanted tumors have demonstrated at least limited utility. Presently, however, the 5-year survival rate for patients afflicted with stage III ovarian cancer is 25%, and the survival rate for patients afflicted with stage IV ovarian cancer is 8%.

[0013] In summary, the earlier ovarian cancer is detected, the aggressiveness of therapeutic intervention and the side effects associated with therapeutic intervention are minimized. More importantly, the earlier the cancer is detected, the survival rate and quality of life of ovarian cancer patients is enhanced. Thus, a pressing need exists for methods of detecting ovarian cancer as early as possible. There also exists a need for methods of detecting recurrence of ovarian cancer as well as methods for predicting and monitoring the efficacy of treatment. There further exists a need for new therapeutic methods for treating ovarian cancer. The present invention satisfies these needs.

### SUMMARY OF THE INVENTION

[0014] The invention relates to cancer markers (hereinafter “markers” or “markers of the inventions”), which are listed in Tables 1-3. The invention provides nucleic acids and proteins that are encoded by or correspond to the markers (hereinafter “marker nucleic acids” and “marker proteins,” respectively). The invention further provides antibodies, antibody derivatives and antibody fragments which bind specifically with such proteins and/or fragments of the proteins.

[0015] In one aspect, the invention relates to various diagnostic, monitoring, test and other methods related to ovarian cancer detection and therapy. In one embodiment, the invention provides a diagnostic method of assessing whether a patient has ovarian cancer or has higher than normal risk for developing ovarian cancer, comprising the steps of comparing the level of expression of a marker of the invention in a patient sample and the normal level of expression of the marker in a control, e.g., a sample from a patient without ovarian cancer. A significantly higher level of expression of the marker in the patient sample as compared to the normal level is an indication that the patient is afflicted with ovarian cancer or has higher than normal risk for developing ovarian cancer.

[0016] In a preferred embodiment of the diagnostic method, the marker is over-expressed by at least two-fold in at least about 20% of stage I ovarian cancer patients, stage II ovarian cancer patients, stage III ovarian cancer patients, stage IV ovarian cancer patients, grade I ovarian cancer patients, grade II ovarian cancer patients, grade III ovarian cancer patients, epithelial ovarian cancer patients, stromal ovarian cancer patients, germ cell ovarian cancer patients, malignant ovarian cancer patients, benign ovarian cancer patients, serous neoplasm ovarian cancer patients, mucinous neoplasm ovarian cancer patients, endometrioid neoplasm ovarian cancer patients and/or clear cell neoplasm ovarian cancer patients.

[0017] The diagnostic methods of the present invention are particularly useful for patients with an identified pelvic mass or symptoms associated with ovarian cancer. The methods of the present invention can also be of particular use with patients having an enhanced risk of developing ovarian cancer (e.g., patients having a familial history of ovarian cancer, patients identified as having a mutant oncogene, and patients at least about 50 years of age).

[0018] In a preferred diagnostic method of assessing whether a patient is afflicted with ovarian cancer (e.g., new detection (“screening”), detection of recurrence, reflex testing), the method comprises comparing:

[0019] a) the level of expression of a marker of the invention in a patient sample, and

[0020] b) the normal level of expression of the marker in a control non-ovarian cancer sample.

[0021] A significantly higher level of expression of the marker in the patient sample as compared to the normal level is an indication that the patient is afflicted with ovarian cancer.

[0022] The invention also provides diagnostic methods for assessing the efficacy of a therapy for inhibiting ovarian cancer in a patient. Such methods comprise comparing:

[0023] a) expression of a marker of the invention in a first sample obtained from the patient prior to providing at least a portion of the therapy to the patient, and

[0024] b) expression of the marker in a second sample obtained from the patient following provision of the portion of the therapy.

[0025] A significantly lower level of expression of the marker in the second sample relative to that in the first sample is an indication that the therapy is efficacious for inhibiting ovarian cancer in the patient.

[0026] It will be appreciated that in these methods the “therapy” may be any therapy for treating ovarian cancer including, but not limited to, chemotherapy, radiation therapy, surgical removal of tumor tissue, gene therapy and biologic therapy such as the administering of antibodies and chemokines. Thus, the methods of the invention may be used to evaluate a patient before, during and after therapy, for example, to evaluate the reduction in tumor burden.

[0027] In a preferred embodiment, the diagnostic methods of the present invention are directed to therapy using a chemical or biologic agent. These methods comprise comparing:

[0028] a) expression of a marker of the invention in a first sample obtained from the patient and maintained in the presence of the chemical or biologic agent, and

[0029] b) expression of the marker in a second sample obtained from the patient and maintained in the absence of the agent.

[0030] A significantly lower level of expression of the marker in the first sample relative to that in the second sample is an indication that the agent is efficacious for inhibiting ovarian cancer in the patient. In one embodiment, the first and second samples can be portions of a single sample obtained from the patient or portions of pooled samples obtained from the patient.

[0031] The invention additionally provides a monitoring method for assessing the progression of ovarian cancer in a patient, the method comprising:

[0032] a) detecting in a patient sample at a first time point, the expression of a marker of the invention;

[0033] b) repeating step a) at a subsequent time point in time; and

[0034] c) comparing the level of expression detected in steps a) and b), and therefrom monitoring the progression of ovarian cancer in the patient.

[0035] A significantly higher level of expression of the marker in the sample at the subsequent time point from that of the sample at the first time point is an indication that the ovarian cancer has progressed, whereas a significantly lower level of expression is an indication that the ovarian cancer has regressed.

[0036] The invention further provides a diagnostic method for determining whether ovarian cancer has metastasized or is likely to metastasize in the future, the method comprising comparing:

[0037] a) the level of expression of a marker of the invention in a patient sample, and

[0038] b) the normal level (or non-metastatic level) of expression of the marker in a control sample.

[0039] A significantly higher level of expression in the patient sample as compared to the normal level (or non-metastatic level) is an indication that the ovarian cancer has metastasized or is likely to metastasize in the future.

[0040] The invention moreover provides a test method for selecting a composition for inhibiting ovarian cancer in a patient. This method comprises the steps of:

[0041] a) obtaining a sample comprising cancer cells from the patient;

[0042] b) separately maintaining aliquots of the sample in the presence of a plurality of test compositions;

[0043] c) comparing expression of a marker of the invention in each of the aliquots; and

[0044] d) selecting one of the test compositions which significantly reduces the level of expression of the marker in the aliquot containing that test composition, relative to the levels of expression of the marker in the presence of the other test compositions.

[0045] The invention additionally provides a test method of assessing the ovarian carcinogenic potential of a compound. This method comprises the steps of:

[0046] a) maintaining separate aliquots of ovarian cells in the presence and absence of the compound; and

[0047] b) comparing expression of a marker of the invention in each of the aliquots.

[0048] A significantly higher level of expression of the marker in the aliquot maintained in the presence of the compound, relative to that of the aliquot maintained in the absence of the compound, is an indication that the compound possesses ovarian carcinogenic potential.

[0049] In addition, the invention further provides a method of inhibiting ovarian cancer in a patient. This method comprises the steps of:

[0050] a) obtaining a sample comprising cancer cells from the patient;

[0051] b) separately maintaining aliquots of the sample in the presence of a plurality of compositions;

[0052] c) comparing expression of a marker of the invention in each of the aliquots; and

[0053] d) administering to the patient at least one of the compositions which significantly lowers the level of expression of the marker in the aliquot containing that composition, relative to the levels of expression of the marker in the presence of the other compositions.

[0054] In the aforementioned methods, the samples or patient samples comprise cells obtained from the patient. The cells may be found in an ovarian tissue sample collected, for example, by an ovarian tissue biopsy or histology section. In one embodiment, the patient sample is an ovary-associated body fluid. Such fluids include, for example, blood fluids, lymph, ascites fluids, gynecological fluids, cystic fluids, urine, and fluids collected by peritoneal rinsing. In another embodiment, the sample comprises cells obtained from the patient. In this embodiment, the cells may be found in a fluid selected from the group consisting of a fluid collected by peritoneal rinsing, a fluid collected by uterine rinsing, a uterine fluid, a uterine exudate, a pleural fluid, and an ovarian exudate. In a further embodiment, the patient sample is in vivo.

[0055] According to the invention, the level of expression of a marker of the invention in a sample can be assessed, for example, by detecting the presence in the sample of:

[0056] the corresponding marker protein or a fragment of the protein (e.g. by using a reagent, such as an antibody, an antibody derivative, an antibody fragment or single-chain antibody, which binds specifically with the protein or protein fragment).

[0057] the corresponding marker nucleic acid or a fragment of the nucleic acid (e.g. by contacting transcribed polynucleotides obtained from the sample with a substrate having affixed thereto one or more nucleic acids having the entire or a segment of the sequence or a complement thereof)

[0058] a metabolite which is produced directly (i.e., catalyzed) or indirectly by the corresponding marker protein.

[0059] According to the invention, any of the aforementioned methods may be performed using a plurality (e.g. 2, 3, 5, or 10 or more) of ovarian cancer markers, including ovarian cancer markers known in the art. In such methods, the level of expression in the sample of each of a plurality of markers, at least one of which is a marker of the invention, is compared with the normal level of expression of each of the plurality of markers in samples of the same type obtained from control humans not afflicted with ovarian cancer. A significantly altered (i.e., increased or decreased as specified in the above-described methods using a single marker) level of expression in the sample of one or more markers of the invention, or some combination thereof, relative to that marker's corresponding normal levels, is an indication that the patient is afflicted with ovarian cancer. For all of the aforementioned methods, the marker(s) are preferably selected such that the positive predictive value of the method is at least about 10%.

[0060] In a further aspect, the invention provides an antibody, an antibody derivative, or an antibody fragment, which binds specifically with a marker protein or a fragment of the protein. The invention also provides methods for making such antibody, antibody derivative, and antibody fragment. Such methods may comprise immunizing a mammal with a protein or peptide comprising the entirety, or a segment of 10 amino acids or more, of a marker protein, wherein the protein or peptide may be obtained from a cell or by chemical synthesis. The methods of the invention also encompass producing monoclonal and single-chain antibodies, which would further comprise isolating splenocytes from the immunized mammal, fusing the isolated splenocytes with an immortalized cell line to form hybridomas, and screening individual hybridomas for those that produce an antibody that binds specifically with a marker protein or a fragment of the protein.

[0061] In another aspect, the invention relates to various diagnostic and test kits. In one embodiment, the invention provides a kit for assessing whether a patient is afflicted with ovarian cancer. The kit comprises a reagent for assessing expression of a marker of the invention. In another embodiment, the invention provides a kit for assessing the suitability of a chemical or biologic agent for inhibiting an ovarian cancer in a patient. Such kit comprises a reagent for assessing expression of a marker of the invention, and may also comprise one or more of such agents. In a further embodiment, the invention provides kits for assessing the presence of ovarian cancer cells or treating ovarian cancers. Such kits comprise an antibody, an antibody derivative, or an antibody fragment, which binds specifically with a marker protein, or a fragment of the protein. Such kits may also comprise a plurality of antibodies, antibody derivatives, or antibody fragments wherein the plurality of such antibody agents binds specifically with a marker protein, or a fragment of the protein.

[0062] In an additional embodiment, the invention also provides a kit for assessing the presence of ovarian cancer cells, wherein the kit comprises a nucleic acid probe that binds specifically with a marker nucleic acid or a fragment of the nucleic acid. The kit may also comprise a plurality of probes, wherein each of the probes binds specifically with a marker nucleic acid, or a fragment of the nucleic acid.

[0063] In a further aspect, the invention relates to methods for treating a patient afflicted with ovarian cancer or at risk of developing ovarian cancer. Such methods may comprise reducing the expression and/or interfering with the biological function of a marker of the invention. In one embodiment, the method comprises providing to the patient an antisense oligonucleotide or polynucleotide complementary to a marker nucleic acid, or a segment thereof. For example, an antisense polynucleotide may be provided to the patient through the delivery of a vector that expresses an antisense polynucleotide of a marker nucleic acid or a fragment thereof. In another embodiment, the method comprises providing to the patient an antibody, an antibody derivative, or antibody fragment, which binds specifically with a marker protein or a fragment of the protein. In a preferred embodiment, the antibody, antibody derivative or antibody fragment binds specifically with a protein having the sequence of any of the markers listed in Table 1, or a fragment of such a protein.

[0064] It will be appreciated that the methods and kits of the present invention may also include known cancer markers including known ovarian cancer markers. It will further be appreciated that the methods and kits may be used to identify cancers other than ovarian cancer.

### BRIEF DESCRIPTION OF THE DRAWINGS

[0065] FIG. 1 depicts a graph which represents the results of the TaqMan® expression study.

### DETAILED DESCRIPTION OF THE INVENTION

[0066] The invention relates to newly discovered markers, identified in Tables 1-3, that are associated with the cancerous state of ovarian cells. It has been discovered that the higher than normal level of expression of any of these markers or combination of these markers correlates with the presence of ovarian cancer in a patient. Methods are provided for detecting the presence of ovarian cancer in a sample, the absence of ovarian cancer in a sample, the stage of an ovarian cancer, and with other characteristics of ovarian cancer that are relevant to prevention, diagnosis, characterization, and therapy of ovarian cancer in a patient. Methods of treating ovarian cancer are also provided.

[0067] Tables 1-3 list the markers of the present invention. In the Tables the markers are identified with a name (“Marker”), the name the gene is commonly known by, if applicable (“Gene Name”), the Sequence Listing identifier of the cDNA sequence of a nucleotide transcript encoded by or corresponding to the marker (“SEQ ID NO (nts)”), the Sequence Listing identifier of the amino acid sequence of a protein encoded by the nucleotide transcript (“SEQ ID NO (AAs)”), and the location of the protein coding sequence within the cDNA sequence (“CDS”).

[0068] Table 1 lists all of the markers of the invention, which are over-expressed in ovarian cancer cells compared to normal (i.e., non-cancerous) ovarian cells and comprises markers listed in Tables 2 and 3. Table 2 lists newly-identified nucleotide and amino acid sequences useful as ovarian cancer markers. Table 3 lists newly-identified nucleotide sequences useful as ovarian cancer markers.

[0069] In addition to their use in ovarian cancer, it has been found that the markers of the present invention may be used in the diagnosis, characterization, management, and therapy of additional diseases. For example, OV65 (SEQ ID NOS: 305 and 306), M593 (SEQ ID NOS: 307 and 308) and M594 (SEQ ID NOS: 309 and 310), are spondin molecules, and have one or more of the following activities: (1) neural cell adhesion and (2) neurite extension and can thus be used in, for example, the diagnosis and treatment of brain and CNS related disorders. Such brain and CNS related disorders include, but are not limited to, bacterial and viral meningitis, Alzheimers Disease, cerebral toxoplasmosis, Parkinson's disease, multiple sclerosis, brain cancers (e.g., metastatic carcinoma of the brain, glioblastoma, lymphoma, astrocytoma, acoustic neuroma), hydrocephalus, and encephalitis. In another example, OV65, M593 and M594 polypeptides, nucleic acids, and modulators thereof can be used to treat disorders of the brain, such as cerebral edema, hydrocephalus, brain herniations, iatrogenic disease (due to, e.g., infection, toxins, or drugs), inflammations (e.g., bacterial and viral meningitis, encephalitis, and cerebral toxoplasmosis), cerebrovascular diseases (e.g., hypoxia, ischemia, infarction, intracranial hemorrhage, vascular malformations, and hypertensive encephalopathy), and tumors (e.g., neuroglial tumors, neuronal tumors, tumors of pineal cells, meningeal tumors, primary and secondary lymphomas, intracranial tumors, and medulloblastoma), and to treat injury or trauma to the brain.

[0070] OV25 (SEQ ID NOS: 360 and 361), an HE4 protein, has one or more of the following activities: (1) sperm maturation and (2) inhibition of extracellular proteases and can thus be used in, for example, the treatment and diagnosis of diseases and disorders relating to spermatogenesis. For example, OV25 polypeptides, nucleic acids, and modulators thereof can be used to treat testicular disorders, such as unilateral testicular enlargement (e.g., nontuberculous, granulomatous orchitis); inflammatory diseases resulting in testicular dysfunction (e.g., gonorrhea and mumps); cryptorchidism; sperm cell disorders (e.g., immotile cilia syndrome and germinal cell aplasia); acquired testicular defects (e.g., viral orchitis); and tumors (e.g., germ cell tumors, interstitial cell tumors, androblastoma, testicular lymphoma and adenomatoid tumors).

[0071] OV52 (SEQ ID NOS: 190 and 191), a Pump-1 proteinase, has been found to have one or more of the following activities: (1) breakdown of extracellular matrix in normal physiological processes, such as embryonic development, reproduction, and remodeling, as well as in (2) disease processes, such as arthritis, and metastasis. Hence, OV52 nucleic acids, proteins, and modulators thereof can be used to modulate disorders associated with adhesion and migration of cells, e.g., platelet aggregation disorders (e.g., Glanzmann's thromboasthemia, which is a bleeding disorder characterized by failure of platelet aggregation in response to cell stimuli), inflammatory disorders (e.g., leukocyte adhesion deficiency, which is a disorder associated with impaired migration of neutrophils to sites of extravascular inflammation), connective tissue disorders, arthritis, disorders associated with abnormal tissue migration during embryo development, and tumor metastasis.

[0072] M604 (SEQ ID NOS: 48 and 49), OV10 (SEQ ID NOS: 50 and 51), and M360 (SEQ ID NOS: 52 and 53), are Claudin molecules which have one or more of the following activities: (1) it elicits fluid accumulation in the intestinal tract by altering the membrane permeability of intestinal epithelial cells and (2) thus acts as the causative agent of diarrhea. The polypeptides, nucleic acids, and modulators thereof can be used to treat colonic disorders, such as congenital anomalies (e.g., megacolon and imperforate anus), idiopathic disorders (e.g., diverticular disease and melanosis coli), vascular lesions (e.g., ischemic colistis, hemorrhoids, angiodysplasia), inflammatory diseases (e.g., colitis (e.g., idiopathic ulcerative colitis, pseudomembranous colitis), and lymphopathia venereum), Crohn's disease, and tumors (e.g., hyperplastic polyps, adenomatous polyps, bronchogenic cancer, colonic carcinoma, squamous cell carcinoma, adenoacanthomas, sarcomas, lymphomas, argentaffinomas, carcinoids, and melanocarcinomas).

[0073] OV48 (SEQ ID NOS: 226 and 227), OV49 (SEQ ID NOS: 228 and 229) and OV50 (SEQ ID NOS: 230 and 231), markers for an osteopontin protein, have one or more of the following activities: (1) they act as a vessel extracellular matrix protein involved in calcification and (2) atherosclerosis. Hence, OV48, OV49 and OV50 nucleic acids, proteins, and modulators thereof can be used to treat heart disorders, e.g., ischemic heart disease, atherosclerosis, hypertension, angina pectoris, Hypertrophic Cardiomyopathy, and congenital heart disease. They can also be used to treat cardiovascular disorders, such as ischemic heart disease (e.g., angina pectoris, myocardial infarction, and chronic ischemic heart disease), hypertensive heart disease, pulmonary heart disease, valvular heart disease (e.g., rheumatic fever and rheumatic heart disease, endocarditis, mitral valve prolapse, and aortic valve stenosis), congenital heart disease (e.g., valvular and vascular obstructive lesions, atrial or ventricular septal defect, and patent ductus arteriosus), or myocardial disease (e.g., myocarditis, congestive cardiomyopathy, and hypertrophic cariomyopathy).

[0074] OV37 (SEQ ID NOS: 176 and 177), a lipocalin marker, is known to be a component of the neutrophil gelatinase complex. OV37 nucleic acids, proteins, and modulators thereof can be used to modulate the proliferation, differentiation, and/or function of leukocytes. Thus, OV37 nucleic acids, proteins, and modulators thereof can be used to treat bone marrow, blood, and hematopoietic associated diseases and disorders, e.g., acute myeloid leukemia, hemophilia, leukemia, anemia (e.g., sickle cell anemia), and thalassemia. OV37 polypeptides, nucleic acids, and modulators thereof can be used to treat leukocytic disorders, such as leukopenias (e.g., neutropenia, monocytopenia, lymphopenia, and granulocytopenia), leukocytosis (e.g., granulocytosis, lymphocytosis, eosinophilia, monocytosis, acute and chronic lymphadenitis), malignant lymphomas (e.g., Non-Hodgkin's lymphomas, Hodgkin's lymphomas, leukemias, agnogenic myeloid metaplasia, multiple myeloma, plasmacytoma, Waldenstrom's macroglobulinemia, heavy-chain disease, monoclonal gammopathy, histiocytoses, eosinophilic granuloma, and angioimmunoblastic lymphadenopathy).

[0075] OV2 (SEQ ID NOS: 285 and 286), is known to be a protease inhibitor, which is associated with emphysema and liver disease. Hence OV2 polypeptides, nucleic acids, and modulators thereof can be used to diagnose and treat pulmonary (lung) disorders, such as atelectasis, cystic fibrosis, rheumatoid lung disease, pulmonary congestion or edema, chronic obstructive airway disease (e.g., emphysema, chronic bronchitis, bronchial asthma, and bronchiectasis), diffuse interstitial diseases (e.g., sarcoidosis, pneumoconiosis, hypersensitivity pneumonitis, bronchiolitis, Goodpasture's syndrome, idiopathic pulmonary fibrosis, idiopathic pulmonary hemosiderosis, pulmonary alveolar proteinosis, desquamative interstitial pneumonitis, chronic interstitial pneumonia, fibrosing alveolitis, hamman-rich syndrome, pulmonary eosinophilia, diffuse interstitial fibrosis, Wegener's granulomatosis, lymphomatoid granulomatosis, and lipid pneumonia), or tumors (e.g., bronchogenic carcinoma, bronchiolovlveolar carcinoma, bronchial carcinoid, hamartoma, and mesenchymal tumors). In another example, OV2 polypeptides, nucleic acids, and modulators thereof can be used to diagnose and treat hepatic (liver) disorders, such as jaundice, hepatic failure, hereditary hyperbiliruinemias (e.g., Gilbert's syndrome, Crigler-Naijar syndromes and Dubin-Johnson and Rotor's syndromes), hepatic circulatory disorders (e.g., hepatic vein thrombosis and portal vein obstruction and thrombosis), hepatitis (e.g., chronic active hepatitis, acute viral hepatitis, and toxic and drug-induced hepatitis), cirrhosis (e.g., alcoholic cirrhosis, biliary cirrhosis, and hemochromatosis), or malignant tumors (e.g., primary carcinoma, hepatoma, hepatoblastoma, liver cysts, and angiosarcoma).

[0076] OV32 (SEQ ID NOS: 166 and 167) and OV33 (SEQ ID NOS: 168 and 169), kallikrein markers, are useful in detection of primary mammary carcinomas, as well as primary ovarian cancers. Hence, OV32 and OV33 polypeptides, nucleic acids, and modulators thereof can be used to diagnose and treat ovarian disorders, such as ovarian endometriosis, non-neoplastic cysts (e.g., follicular and luteal cysts and polycystic ovaries) and tumors (e.g., carcinomas, tumors of surface epithelium, germ cell tumors, ovarian fibroma, sex cord-stromal tumors, and ovarian cancers (e.g., metastatic carcinomas, and ovarian teratoma)).

[0077] OV68 (SEQ ID NOS: 192 and 193), OV69 (SEQ ID NOS: 194 and 195), OV70 (SEQ ID NOS: 196 and 197), OV71 (SEQ ID NOS: 198 and 199), OV72 (SEQ ID NOS: 200 and 201), OV41 (SEQ ID NOS: 202 and 203), OV42 (SEQ ID NOS: 204 and 205), OV43 (SEQ ID NOS: 206 and 205), OV44 (SEQ ID NOS: 207 and 208) and OV83 (SEQ ID NOS: 209 and 210), are all mesothelin markers, and have been found to play a role in cellular adhesion. The nucleic acids, proteins, and modulators thereof can be used to diagnose, treat and modulate disorders associated with adhesion and migration of cells, e.g., platelet aggregation disorders (e.g., Glanzmann's thromboasthemia, which is a bleeding disorder characterized by failure of platelet aggregation in response to cell stimuli), inflammatory disorders (e.g., leukocyte adhesion deficiency, which is a disorder associated with impaired migration of neutrophils to sites of extravascular inflammation), disorders associated with abnormal tissue migration during embryo development, and tumor metastasis.

[0078] OV17 (SEQ ID NOS: 110 and 111), OV18 (SEQ ID NOS: 112 and 111), OV19 (SEQ ID NOS: 113 and 111), OV20 (SEQ ID NOS: 114 and 111), OV21 (SEQ ID NOS: 115 and 111) and OV22 (SEQ ID NOS: 116 and 117) are folate receptors, which are known to be markers of ovarian cancer. The nucleic acids, proteins, and modulators thereof can be used to diagnose, treat and modulate ovarian disorders (e.g., ovarian cyst, ovarian fibroma, ovarian endometriosis, ovarian teratoma). Although these markers have been previously associated with ovarian cancer, the expression of such markers has not yet been identified in combination with the expression of other markers including those of the present invention. Such combination of markers will provide improved methods of diagnosing, characterizing, managing and treating ovarian cancer.

[0079] OV66 (SEQ ID NOS: 54 and 55), OV7 (SEQ ID NOS: 56 and 57), OV8 (SEQ ID NOS: 58 and 59) and OV81 (SEQ ID NOS: 60 and 61) are ceruloplasmin markers, known to encode a plasma metalloprotein that binds copper in the plasma. The nucleic acids, proteins, and modulators thereof can be used to diagnose, treat and modulate disorders in blood haemostasis and diseases caused by such an imbalance e.g., (1) cardiovascular diseases or disorders, such as ischemic heart disease (e.g., angina pectoris, myocardial infarction, and chronic ischemic heart disease), hypertensive heart disease, pulmonary heart disease, valvular heart disease (e.g. rheumatic fever and rheumatic heart disease, endocarditis, mitral valve prolapse, and aortic valve stenosis), congenital heart disease (e.g., valvular and vascular obstructive lesions, atrial or ventricular septal defect, and patent ductus arteriosus), or myocardial disease (e.g., myocarditis, congestive cardiomyopathy, and hypertrophic cariomyopathy); (2) neuronal diseases such as Alzheimers Disease, cerebral toxoplasmosis, Parkinson's disease, multiple sclerosis, brain cancers (e.g., metastatic carcinoma of the brain, glioblastoma, lymphoma, astrocytoma, acoustic neuroma), hydrocephalus, and encephalitis; and (3) Wilson's Disease.

TABLE 1

| | | SEQ ID | SEQ ID | |
|---|---|---|---|---|
| Marker | Gene Name | NO (nts) | NO (AAs) | CDS |
| OV1 | ABCB1: ATP-binding cassette, sub-family B | 1 | 2 | 425 . . . 4264 |
| | (MDR/TAP), member 1 | | | |
| M430 | ADPRT: ADP-ribosyltransferase | 3 | 4 | 160 . . . 3204 |
| M571 | ANXA2: annexin A2, variant 1 | 5 | 6 | 134 . . . 1153 |
| M572 | ANXA2: annexin A2, variant 2 | 7 | 8 | 50 . . . 1069 |
| M573 | ANXA4: annexin A4 | 9 | 10 | 74 . . . 1039 |
| OV3 | AQP5: aquaporin 5 | 11 | 12 | 519 . . . 1316 |
| M352 | ARHGAP8: Rho GTPase activating protein 8, | 13 | 14 | 142 . . . 1536 |
| | variant 1 | | | |
| M353 | ARHGAP8: Rho GTPase activating protein 8, | 15 | 16 | 1 . . . 2043 |
| | variant 2 | | | |
| M354 | ARHGAP8: Rho GTPase activating protein 8, | 17 | 18 | 1 . . . 2256 |
| | variant 3 | | | |
| M608 | ARHGAP8: Rho GTPase activating protein 8, | 17 | 19 | 1 . . . 2157 |
| | variant 4 | | | |
| M355 | ARHGAP8: Rho GTPase activating protein 8, | 20 | 21 | <1 . . . 1314 |
| | variant 5 | | | |
| M356 | ARHGAP8: Rho GTPase activating protein 8, | 22 | 23 | 1 . . . 1902 |
| | variant 6 | | | |
| M357 | ARHGAP8: Rho GTPase activating protein 8, | 24 | 25 | <1 . . . 1281 |
| | variant 7 | | | |
| M358 | ARHGAP8: Rho GTPase activating protein 8, | 26 | 27 | 1 . . . 1386 |
| | variant 8 | | | |
| M359 | ARHGAP8: Rho GTPase activating protein 8, | 28 | 29 | <1 . . . 1059 |
| | variant 9 | | | |
| OV5 | BICD1: Bicaudal D homolog 1 (Drosophila) | 30 | 31 | 82 . . . 3009 |
| M431 | BTG2: BTG family, member 2 | 32 | 33 | 72 . . . 548 |
| M432 | CADPS: Ca2 + − dependent activator protein for | 34 | 35 | 240 . . . 4412 |
| | secretion | | | |
| M609 | CDH1: cadherin 1, type 1, E-cadherin | 36 | 37 | 125 . . . 2773 |
| | (epithelial) | | | |
| M433 | CDH6: cadherin 6, type 2, K-cadherin | 38 | 39 | 327 . . . 2699 |
| M434 | CDKN2A: cyclin-dependent kinase | 40 | 41 | 41 . . . 511 |
| | inhibitor 2A | | | |
| OV9 | CGN: cingulin | 42 | 43 | 152 . . . 3763 |
| OV6 | CHI3L1: cartilage glycoprotein-39 | 44 | 45 | 127 . . . 1278 |
| M435 | CKMT1: creatine kinase, mitochondrial 1 | 46 | 47 | 164 . . . 1417 |
| | (ubiquitous) | | | |
| M604 | CLDN10: claudin 10 | 48 | 49 | 36 . . . 772 |
| OV10 | CLDN16: claudin 16 | 50 | 51 | 69 . . . 986 |
| M360 | CLDN4: claudin 4 | 52 | 53 | 183 . . . 812 |
| OV66 | CP: ceruloplasmin (ferroxidase), variant 1 | 54 | 55 | 1 . . . 3210 |
| OV7 | CP: ceruloplasmin (ferroxidase), variant 2 | 56 | 57 | <1 . . . 2561 |
| OV8 | CP: ceruloplasmin (ferroxidase), variant 3 | 58 | 59 | 1 . . . 3198 |
| OV81 | CP: ceruloplasmin (ferroxidase), variant 4 | 60 | 61 | 76 . . . 3348 |
| M103 | CRABP2: cellular retinoic acid-binding | 62 | 63 | 138 . . . 554 |
| | protein 2 | | | |
| OV40 | DD96: Epithelial protein up-regulated in | 64 | 65 | 202 . . . 546 |
| | carcinoma, membrane associated protein 17 | | | |
| OV4 | DEC2: basic helix-loop-helix protein | 66 | 67 | 135 . . . 1583 |
| M575 | dehydrogenase | 68 | 69 | 339 . . . 1364 |
| M436 | DLX5: distal-less homeo box 5 | 70 | 71 | 204 . . . 1073 |
| OV12 | EAB1: Eab1 protein | 72 | 73 | <1 . . . 1305 |
| OV13 | ESX protein | 74 | 75 | 96 . . . 1211 |
| OV67 | EVI-1: Evi-1 protein, variant 1 | 76 | 77 | 250 . . . 2406 |
| OV14 | EVI-1: Evi-1 protein, variant 2 | 78 | 79 | 250 . . . 3405 |
| OV15 | EVI-1: Evi-1 protein, variant 3 | 80 | 81 | 250 . . . 2433 |
| OV16 | EVI-1: Evi-1 protein, variant 4 | 82 | 83 | 250 . . . 3378 |
| M437 | FLJ10546: hypothetical protein FLJ10546 | 84 | 85 | 28 . . . 1815 |
| OV28 | FLJ12799: hypothetical protein FLJ12799 | 86 | 87 | 39 . . . 797 |
| M576 | FLJ13710: hypothetical protein FLJ13710 | 88 | 89 | 96 . . . 1712 |
| M438 | FLJ13782: hypothetical protein FLJ13782 | 90 | 91 | 13 . . . 1890 |
| OV29 | FLJ20150: hypothetical protein FLJ20150 | 92 | 93 | 78 . . . 983 |
| M439 | FLJ20327: hypothetical protein FLJ20327 | 94 | 95 | 306 . . . 2186 |
| M440 | FLJ20758: hypothetical protein FLJ20758, | 96 | 97 | <2 . . . 1270 |
| | variant 1 | | | |
| M441 | FLJ20758: hypothetical protein FLJ20758, | 98 | 99 | <2 . . . 2095 |
| | variant 2 | | | |
| M442 | FLJ20758: hypothetical protein FLJ20758, | 100 | 101 | 465 . . . 1307 |
| | variant 3 | | | |
| M443 | FLJ22252: likely ortholog of mouse SRY-box | 102 | 103 | 205 . . . 1449 |
| | containing gene 17 | | | |
| M444 | FLJ22316: hypothetical protein FLJ22316 | 104 | 105 | 508 . . . 1206 |
| M400 | FLJ22418: hypothetical protein FLJ22418 | 106 | 107 | 71 . . . 919 |
| M445 | FLJ23499: hypothetical protein FLJ23499 | 108 | 109 | 21 . . . 473 |
| OV17 | FOLR1: folate receptor 1 (alpha), variant 1 | 110 | 111 | 139 . . . 912 |
| OV18 | FOLR1: folate receptor 1 (alpha), variant 2 | 112 | 111 | 211 . . . 984 |
| OV19 | FOLR1: folate receptor 1 (alpha), variant 3 | 113 | 111 | 46 . . . 819 |
| OV20 | FOLR1: folate receptor 1 (alpha), variant 4 | 114 | 111 | 437 . . . 1210 |
| OV21 | FOLR1: folate receptor 1 (alpha), variant 5 | 115 | 111 | 11 . . . 784 |
| OV22 | FOLR3: folate receptor 3 (gamma) | 116 | 117 | 57 . . . 788 |
| OV23 | GPR39: G protein-coupled receptor 39 | 118 | 119 | 1 . . . 1362 |
| M446 | GPRC5B: G protein-coupled receptor, | 120 | 121 | 109 . . . 1320 |
| | family C, group 5, member B | | | |
| OV24 | G-protein coupled receptor | 122 | 123 | 274 . . . 1236 |
| M447 | GRB7: growth factor receptor-bound protein 7 | 124 | 125 | 220 . . . 1818 |
| OV11 | HAIK1: type I intermediate filament | 126 | 127 | 61 . . . 1329 |
| | cytokeratin | | | |
| M448 | HOXB7: homeo box B7 | 128 | 129 | 100 . . . 753 |
| M138 | HSECP1: secretory protein, variant 1 | 130 | 131 | 27 . . . 863 |
| M449 | HSECP1: secretory protein, variant 2 | 132 | 133 | 136 . . . 768 |
| M450 | HSECP1: secretory protein, variant 3 | 134 | 135 | 202 . . . 933 |
| M451 | HSNFRK: HSNFRK protein | 136 | 137 | 642 . . . 2939 |
| OV26 | hypothetical protein (1) | 138 | 139 | <1 . . . 1140 |
| OV27 | hypothetical protein (2) | 140 | 141 | 242 . . . 1483 |
| OV31 | IFI30: interferon, gamma-inducible protein 30 | 142 | 143 | 41 . . . 952 |
| OV58 | IGF2: somatomedin A | 144 | 145 | 553 . . . 1095 |
| M452 | IMP-2: IGF-II mRNA-binding protein 2 | 146 | 147 | 436 . . . 2106 |
| M453 | INDO: indoleamine-pyrrole 2,3 dioxygenase | 148 | 149 | 23 . . . 1234 |
| OV73 | IPT: tRNA isopentenylpyrophosphate | 150 | 151 | 15 . . . 1418 |
| | transferase, variant 1 | | | |
| M610 | IPT: tRNA isopentenylpyrophosphate | 152 | 153 | 15 . . . 1418 |
| | transferase, variant 2 | | | |
| M454 | ITGA3: integrin, alpha 3 | 154 | 155 | 74 . . . 3274 |
| OV30 | ITGB8: integrin, beta 8 | 156 | 157 | 681 . . . 2990 |
| OV34 | KIAA0762: KIAA0762 protein | 158 | 159 | <1 . . . 1875 |
| M455 | KIAA0869: KIAA0869 protein | 160 | 161 | <1 . . . 2668 |
| OV35 | KIAA1154: KIAA1154 protein | 162 | 163 | <1 . . . 677 |
| OV36 | KIAA1456: KIAA1456 protein | 164 | 165 | <366 . . . 1631 |
| OV32 | KLK10: kallikrein 10 | 166 | 167 | 82 . . . 912 |
| OV33 | KLK6: kallikrein 6 | 168 | 169 | 246 . . . 980 |
| M456 | KRT7: keratin 7, variant 1 | 170 | 171 | 57 . . . 1466 |
| M611 | KRT7: keratin 7, variant 2 | 172 | 173 | 54 . . . 1463 |
| OV53 | LC27: Putative integral membrane transporter | 174 | 175 | 204 . . . 1055 |
| OV37 | LCN2: Lipocalin 2 (oncogene 24p3) | 176 | 177 | 1 . . . 597 |
| M457 | LEFTB: left-right determination, factor B | 178 | 179 | 71 . . . 1171 |
| M559 | LPHB: lipophilin B (uteroglobin family | 180 | 181 | 64 . . . 336 |
| | member), prostatein-like | | | |
| OV38 | LYST-interacting protein LIP6 | 182 | 183 | 11 . . . 586 |
| OV39 | MEIS1: MEIS1 protein | 184 | 185 | 66 . . . 1238 |
| M458 | MGB2: mammaglobin 2 | 186 | 187 | 65 . . . 352 |
| M459 | MGC3184: similar to sialyltransferase 7 | 188 | 189 | 176 . . . 1186 |
| | ((alpha-N-acetylneuraminyl 2,3- | | | |
| | betagalactosyl-1,3)-N-acetyl galactosaminide | | | |
| | alpha-2,6-sialyltransferase) E | | | |
| OV52 | MMP7: Matrix metalloproteinase 7 (matrilysin, | 190 | 191 | 28 . . . 831 |
| | uterine) | | | |
| OV68 | MSLN: mesothelin, variant 1 | 192 | 193 | 88 . . . 2196 |
| OV69 | MSLN: mesothelin, variant 2 | 194 | 195 | 88 . . . 1980 |
| OV70 | MSLN: mesothelin, variant 3 | 196 | 197 | 88 . . . 1950 |
| OV71 | MSLN: mesothelin, variant 4 | 198 | 199 | 88 . . . 2172 |
| OV72 | MSLN: mesothelin, variant 5 | 200 | 201 | 88 . . . 1926 |
| OV41 | MSLN: mesothelin, variant 6 | 202 | 203 | <1 . . . >1195 |
| OV42 | MSLN: mesothelin, variant 7 | 204 | 205 | 85 . . . 1953 |
| OV43 | MSLN: mesothelin, variant 8 | 206 | 205 | 88 . . . 1956 |
| OV44 | MSLN: mesothelin, variant 9 | 207 | 208 | 89 . . . 1975 |
| OV83 | MSLN: mesothelin, variant 10 | 209 | 210 | 295 . . . 2187 |
| OV45 | MUC1: mucin 1 | 211 | 212 | 58 . . . 1605 |
| M460 | MUC16: mucin 16, variant 1 | 213 | 214 | <1 . . . 5352 |
| M461 | MUC16: mucin 16, variant 2 | 215 | 216 | 25 . . . 3471 |
| M612 | MUC16: mucin 16, variant 3 | 215 | 217 | <1 . . . 5673 |
| M462 | MYOM2: myomesin (M-protein) | 218 | 219 | 49 . . . 4446 |
| M463 | NaPi-lib: sodium dependent phosphate | 220 | 221 | 36 . . . 2105 |
| | transporter isoform | | | |
| M464 | NME5: protein expressed in non-metastatic | 222 | 223 | 15 . . . 653 |
| | cells 5 | | | |
| OV47 | NUFIP1: nuclear fragile X mental retardation | 224 | 225 | 1 . . . 1488 |
| | protein interacting protein 1 | | | |
| OV48 | OPN-a: Secreted phosphoprotein-1 | 226 | 227 | 1 . . . 942 |
| | (osteopontin, bone sialoprotein) | | | |
| OV49 | OPN-b: Secreted phosphoprotein-1 | 228 | 229 | 88 . . . 990 |
| | (osteopontin, bone sialoprotein) | | | |
| OV50 | OPN-c: Secreted phosphoprotein-1 | 230 | 231 | 1 . . . 861 |
| | (osteopontin, bone sialoprotein) | | | |
| M578 | PAEP: progestagen-associated endometrial | 232 | 233 | 36 . . . 578 |
| | protein, variant 1 | | | |
| M579 | PAEP: progestagen-associated endometrial | 234 | 233 | 36 . . . 578 |
| | protein, variant 2 | | | |
| M580 | PAEP: progestagen-associated endometrial | 235 | 233 | 36 . . . 578 |
| | protein, variant 3 | | | |
| M581 | PAEP: progestagen-associated endometrial | 236 | 233 | 36 . . . 578 |
| | protein, variant 4 | | | |
| M583 | PAEP: progestagen-associated endometrial | 237 | 238 | 45 . . . 305 |
| | protein, variant 5 | | | |
| M582 | PAEP: progestagen-associated endometrial | 239 | 240 | 45 . . . 521 |
| | protein, variant 6 | | | |
| M613 | PAEP: progestagen-associated endometrial | 239 | 241 | 45 . . . 521 |
| | protein, variant 7 | | | |
| M465 | PAX8: paired box gene 8, isoform 8A | 242 | 243 | 11 . . . 1363 |
| M466 | PAX8: paired box gene 8, isoform 8B, | 244 | 245 | 11 . . . 1174 |
| | variant 1 | | | |
| M614 | PAX8: paired box gene 8, isoform 8B, | 244 | 246 | 11 . . . 1174 |
| | variant 2 | | | |
| M467 | PAX8: paired box gene 8, isoform 8C | 247 | 248 | 161 . . . 1357 |
| M468 | PAX8: paired box gene 8, isoform 8D | 249 | 250 | 161 . . . 1126 |
| M469 | PAX8: paired box gene 8, isoform 8E | 251 | 252 | 161 . . . 1024 |
| M470 | PRAME: preferentially expressed antigen in | 253 | 254 | 236 . . . 1765 |
| | melanoma | | | |
| M615 | PRKCI: protein kinase C, iota | 255 | 256 | 205 . . . 1968 |
| M605 | PRP4: serine/threonine-protein kinase PRP4 | 257 | 258 | <1 . . . 3133 |
| | homolog, variant 1 | | | |
| M606 | PRP4: serine/threonine-protein kinase PRP4 | 259 | 258 | <1 . . . 3133 |
| | homolog, variant 2 | | | |
| M607 | PRP4: serine/threonine-protein kinase PRP4 | 260 | 258 | <1 . . . 3133 |
| | homolog, variant 3 | | | |
| OV80 | PRSS8: prostasin | 261 | 262 | 229 . . . 1260 |
| OV51 | PTGS1: prostaglandin-endoperoxide | 263 | 264 | 6 . . . 1805 |
| | synthase 1 | | | |
| M312 | PTK9: protein tyrosine kinase 9 | 265 | 266 | 61 . . . 1113 |
| OV54 | pyruvate dehydrogenase complex | 267 | 268 | 49 . . . >358 |
| | component E2 | | | |
| OV55 | S100A1: S100 calcium-binding protein A1 | 269 | 270 | 114 . . . 398 |
| M471 | S100A11: S100 calcium-binding protein A11 | 271 | 272 | 121 . . . 438 |
| | (calgizzarin) | | | |
| M68 | S100A2: S100 calcium-binding protein A2 | 273 | 274 | 41 . . . 334 |
| M585 | S100A6: S100 calcium-binding protein A6 | 275 | 276 | 103 . . . 375 |
| | (calcyclin) | | | |
| OV57 | SCNN1A: sodium channel, nonvoltage- | 277 | 278 | 100 . . . 2109 |
| | gated 1 alpha, variant 1 | | | |
| OV85 | SCNN1A: sodium channel, nonvoltage- | 279 | 280 | 96 . . . 2105 |
| | gated 1 alpha, variant 2 | | | |
| M472 | secreted protein (HETKL27) | 281 | 282 | 88 . . . 618 |
| M473 | SEMA3A: sema domain, immunoglobulin | 283 | 284 | 16 . . . 2331 |
| | domain (Ig), short basic domain, secreted, | | | |
| | (semaphorin) 3A | | | |
| OV2 | SERPINA1: alpha-1 antitrypsin | 285 | 286 | 35 . . . 1291 |
| M474 | Similar to hypothetical protein, MGC: 7199 | 287 | 288 | 173 . . . 1053 |
| M586 | Similar to proteasome (prosome, macropain) | 289 | 290 | 45 . . . 791 |
| | subunit, alpha type, 3 | | | |
| M587 | Similar to zinc finger protein 136 | 291 | 292 | 139 . . . 1524 |
| M475 | SLPI: secretory leukocyte protease inhibitor | 293 | 294 | 271 . . . 447 |
| | (antileukoproteinase), variant 1 | | | |
| M185 | SLPI: secretory leukocyte protease inhibitor | 295 | 296 | 19 . . . 417 |
| | (antileukoproteinase), variant 2 | | | |
| OV60 | SNCG: synuclein, gamma | 297 | 298 | 49 . . . 432 |
| OV59 | SORL1: sortilin-related receptor | 299 | 300 | 198 . . . 6842 |
| OV56 | SPINT2: serine protease inhibitor, Kunitz | 301 | 302 | 301 . . . 1059 |
| | type, 2, variant 1 | | | |
| OV84 | SPINT2: serine protease inhibitor, Kunitz | 303 | 304 | 332 . . . 919 |
| | type, 2, variant 2 | | | |
| OV65 | SPON1: VSGP/F-spondin, variant 1 | 305 | 306 | 25 . . . 2448 |
| M593 | SPON1: VSGP/F-spondin, variant 2 | 307 | 308 | 180 . . . 2984 |
| M594 | SPON1: VSGP/F-spondin, variant 3 | 309 | 310 | 180 . . . 2687 |
| OV82 | ST14: matriptase | 311 | 312 | 209 . . . 2557 |
| M476 | TACSTD2: tumor-associated calcium signal | 313 | 314 | 616 . . . 1587 |
| | transducer 2 | | | |
| M588 | TFPI2: tissue factor pathway inhibitor 2 | 315 | 316 | 57 . . . 764 |
| OV86 | TMPRSS4: transmembrane protease, | 317 | 318 | 310 . . . 1623 |
| | serine 4 | | | |
| OV74 | TPH: tryptophan hydroxylase, variant 1 | 319 | 320 | 1 . . . 1335 |
| OV75 | TPH: tryptophan hydroxylase, variant 2 | 321 | 322 | 1 . . . 1401 |
| M327 | TSPAN-1: Tetraspan NET-1 protein, variant 1 | 323 | 324 | 124 . . . 900 |
| M328 | TSPAN-1: Tetraspan NET-1 protein, variant 2 | 325 | 326 | 1 . . . 726 |
| OV46 | TTID: myotilin | 327 | 328 | 281 . . . 1777 |
| M589 | UCH2: Ubiquitin carboxyl-terminal hydrolases | 329 | 330 | 551 . . . 2940 |
| | family 2 | | | |
| OV63 | unnamed-gene (1) | 331 | 332 | 71 . . . 919 |
| OV64 | unnamed gene (2) | 333 | 334 | 28 . . . 804 |
| OV76 | unnamed gene (3) | 335 | 336 | 69 . . . 773 |
| OV77 | unnamed gene (4) | 337 | 338 | 223 . . . 1284 |
| OV78 | unnamed gene (5), variant 1 | 339 | 340 | 84 . . . 2450 |
| M616 | unnamed gene (5), variant 2 | 341 | 342 | 84 . . . 2450 |
| OV79 | unnamed gene (6) | 343 | 344 | 69 . . . 392 |
| OV87 | unnamed gene (7) | 345 | 346 | 509 . . . 2428 |
| OV88 | unnamed gene (8) | 347 | 348 | 71 . . . 919 |
| M477 | unnamed gene (9), variant 1 | 349 | 350 | 246 . . . 992 |
| M617 | unnamed gene (9), variant 2 | 349 | 351 | 246 . . . 992 |
| M478 | unnamed gene (9), variant 3 | 352 | 353 | 246 . . . 1004 |
| M479 | unnamed gene (9), variant 4 | 354 | 355 | 246 . . . 1049 |
| M590 | unnamed gene (10), variant 1 | 356 | 357 | 21 . . . 404 |
| M591 | unnamed gene (10), variant 2 | 358 | 357 | 21 . . . 404 |
| M592 | unnamed gene (10), variant 3 | 359 | 357 | 21 . . . 404 |
| OV25 | WFDC2: Epididymis-specific, whey-acidic | 360 | 361 | 28 . . . 405 |
| | protein type, four-disulfide core; putative | | | |
| | ovarian carcinoma marker | | | |
| M480 | XRCC5, KU80: ATP-dependant DNA | 362 | 363 | 34 . . . 2232 |
| | helicase II | | | |

[0080] TABLE 2

| | | SEQ ID | SEQ ID | |
|---|---|---|---|---|
| Marker | Gene Name | NO (nts) | NO (AAs) | CDS |
| M354 | ARHGAP8: Rho GTPase activating protein 8, | 17 | 18 | 1 . . . 2256 |
| | variant 3 | | | |
| M608 | ARHGAP8: Rho GTPase activating protein 8, | 17 | 19 | 1 . . . 2157 |
| | variant 4 | | | |
| M355 | ARHGAP8: Rho GTPase activating protein 8, | 20 | 21 | <1 . . . 1314 |
| | variant 5 | | | |
| M356 | ARHGAP8: Rho GTPase activating protein 8, | 22 | 23 | 1 . . . 1902 |
| | variant 6 | | | |
| M357 | ARHGAP8: Rho GTPase activating protein 8, | 24 | 25 | <1 . . . 1281 |
| | variant 7 | | | |
| M358 | ARHGAP8: Rho GTPase activating protein 8, | 26 | 27 | 1 . . . 1386 |
| | variant 8 | | | |
| M359 | ARHGAP8: Rho GTPase activating protein 8, | 28 | 29 | <1 . . . 1059 |
| | variant 9 | | | |
| OV66 | CP: ceruloplasmin (ferroxidase), variant 1 | 54 | 55 | 1 . . . 3210 |
| OV81 | CP: ceruloplasmin (ferroxidase), variant 4 | 60 | 61 | 76 . . . 3348 |
| M575 | dehydrogenase | 68 | 69 | 339 . . . 1364 |
| OV67 | EVI-1: Evi-1 protein, variant 1 | 76 | 77 | 250 . . . 2406 |
| M440 | FLJ20758: hypothetical protein FLJ20758, | 96 | 97 | <2 . . . 1270 |
| | variant 1 | | | |
| M441 | FLJ20758: hypothetical protein FLJ20758, | 98 | 99 | <2 . . . 2095 |
| | variant 2 | | | |
| M449 | HSECP1: secretory protein, variant 2 | 132 | 133 | 136 . . . 768 |
| M450 | HSECP1: secretory protein, variant 3 | 134 | 135 | 202 . . . 933 |
| OV73 | IPT: tRNA isopentenylpyrophosphate | 150 | 151 | 15 . . . 1418 |
| | transferase, variant 1 | | | |
| M610 | IPT: tRNA isopentenylpyrophosphate | 152 | 153 | 15 . . . 1418 |
| | transferase, variant 2 | | | |
| M611 | KRT7: keratin 7, variant 2 | 172 | 173 | 54 . . . 1463 |
| OV68 | MSLN: mesothelin, variant 1 | 192 | 193 | 88 . . . 2196 |
| OV69 | MSLN: mesothelin, variant 2 | 194 | 195 | 88 . . . 1980 |
| OV70 | MSLN: mesothelin, variant 3 | 196 | 197 | 88 . . . 1950 |
| OV71 | MSLN: mesothelin, variant 4 | 198 | 199 | 88 . . . 2172 |
| OV72 | MSLN: mesothelin, variant 5 | 200 | 201 | 88 . . . 1926 |
| OV83 | MSLN: mesothelin, variant 10 | 209 | 210 | 295 . . . 2187 |
| M460 | MUC16: mucin 16, variant 1 | 213 | 214 | <1 . . . 5352 |
| M583 | PAEP: progestagen-associated endometrial | 237 | 238 | 45 . . . 305 |
| | protein, variant 5 | | | |
| M613 | PAEP: progestagen-associated endometrial | 239 | 241 | 45 . . . 521 |
| | protein, variant 7 | | | |
| M614 | PAX8: paired box gene 8, isoform 8B, | 244 | 246 | 11 . . . 1174 |
| | variant 2 | | | |
| M605 | PRP4: serine/threonine-protein kinase PRP4 | 257 | 258 | <1 . . . 3133 |
| | homolog, variant 1 | | | |
| M606 | PRP4: serine/threonine-protein kinase PRP4 | 259 | 258 | <1 . . . 3133 |
| | homolog, variant 2 | | | |
| M607 | PRP4: serine/threonine-protein kinase PRP4 | 260 | 258 | <1 . . . 3133 |
| | homolog, variant 3 | | | |
| OV85 | SCNN1A: sodium channel, nonvoltage- | 279 | 280 | 96 . . . 2105 |
| | gated 1 alpha, variant 2 | | | |
| M475 | SLPI: secretory leukocyte protease inhibitor | 293 | 294 | 271 . . . 447 |
| | (antileukoproteinase), variant 1 | | | |
| OV84 | SPINT2: serine protease inhibitor, Kunitz | 303 | 304 | 332 . . . 919 |
| | type, 2, variant 2 | | | |
| M593 | SPON1: VSGP/F-spondin, variant 2 | 307 | 308 | 180 . . . 2984 |
| M594 | SPON1: VSGP/F-spondin, variant 3 | 309 | 310 | 180 . . . 2687 |
| OV82 | ST14: matriptase | 311 | 312 | 209 . . . 2557 |
| OV86 | TMPRSS4: transmembrane protease, | 317 | 318 | 310 . . . 1623 |
| | serine 4 | | | |
| OV74 | TPH: tryptophan hydroxylase, variant 1 | 319 | 320 | 1 . . . 1335 |
| OV75 | TPH: tryptophan hydroxylase, variant 2 | 321 | 322 | 1 . . . 1401 |
| M327 | TSPAN-1: Tetraspan NET-1 protein, variant 1 | 323 | 324 | 124 . . . 900 |
| M589 | UCH2: Ubiquitin carboxyl-terminal hydrolases | 329 | 330 | 551 . . . 2940 |
| | family 2 | | | |
| OV76 | unnamed gene (3) | 335 | 336 | 69 . . . 773 |
| OV77 | unnamed gene (4) | 337 | 338 | 223 . . . 1284 |
| OV78 | unnamed gene (5), variant 1 | 339 | 340 | 84 . . . 2450 |
| M616 | unnamed gene (5), variant 2 | 341 | 342 | 84 . . . 2450 |
| OV79 | unnamed gene (6) | 343 | 344 | 69 . . . 392 |
| OV87 | unnamed gene (7) | 345 | 346 | 509 . . . 2428 |
| OV88 | unnamed gene (8) | 347 | 348 | 71 . . . 919 |
| M477 | unnamed gene (9), variant 1 | 349 | 350 | 246 . . . 992 |
| M617 | unnamed gene (9), variant 2 | 349 | 351 | 246 . . . 992 |
| M478 | unnamed gene (9), variant 3 | 352 | 353 | 246 . . . 1004 |
| M479 | unnamed gene (9), variant 4 | 354 | 355 | 246 . . . 1049 |

[0081] TABLE 3

| | | SEQ ID | SEQ ID NO | |
|---|---|---|---|---|
| Marker | Gene Name | NO (nts) | (AAs) | CDS |
| M604 | CLDN10: claudin 10 | 48 | 49 | 36 . . . 772 |
| OV14 | EVI-1: Evi-1 protein, variant 2 | 78 | 79 | 250 . . . 3405 |
| OV15 | EVI-1: Evi-1 protein, variant 3 | 80 | 81 | 250 . . . 2433 |
| OV16 | EVI-1: Evi-1 protein, variant 4 | 82 | 83 | 250 . . . 3378 |
| M576 | FLJ13710: hypothetical protein FLJ13710 | 88 | 89 | 96 . . . 1712 |
| M444 | FLJ22316: hypothetical protein FLJ22316 | 104 | 105 | 508 . . . 1206 |
| OV30 | ITGB8: integrin, beta 8 | 156 | 157 | 681 . . . 2990 |
| OV43 | MSLN: mesothelin, variant 8 | 206 | 205 | 88 . . . 1956 |
| M581 | PAEP: progestagen-associated endometrial | 236 | 233 | 36 . . . 578 |
| | protein, variant 4 | | | |
| M582 | PAEP: progestagen-associated endometrial | 239 | 240 | 45 . . . 521 |
| | protein, variant 6 | | | |
| M466 | PAX8: paired box gene 8, isoform 8B, | 244 | 245 | 11 . . . 1174 |
| | variant 1 | | | |
| M467 | PAX8: paired box gene 8, isoform 8C | 247 | 248 | 161 . . . 1357 |
| M468 | PAX8: paired box gene 8, isoform 8D | 249 | 250 | 161 . . . 1126 |
| M469 | PAX8: paired box gene 8, isoform 8E | 251 | 252 | 161 . . . 1024 |
| OV2 | SERPINA1: alpha-1 antitrypsin | 285 | 286 | 35 . . . 1291 |
| M474 | Similar to hypothetical protein, MGC: 7199 | 287 | 288 | 173 . . . 1053 |
| M590 | unnamed gene (10), variant 1 | 356 | 357 | 21 . . . 404 |
| M591 | unnamed gene (10), variant 2 | 358 | 357 | 21 . . . 404 |
| M592 | unnamed gene (10), variant 3 | 359 | 357 | 21 . . . 404 |

### Definitions

[0082] As used herein, each of the following terms has the meaning associated with it in this section.

[0083] The articles “a” and “an” are used herein to refer to one or to more than one (i.e. to at least one) of the grammatical object of the article. By way of example, “an element” means one element or more than one element.

[0084] A “marker” is a gene whose altered level of expression in a tissue or cell from its expression level in normal or healthy tissue or cell is associated with a disease state, such as cancer. A “marker nucleic acid” is a nucleic acid (e.g., mRNA, cDNA) encoded by or corresponding to a marker of the invention. Such marker nucleic acids can be DNA (e.g., cDNA) comprising the sequences listed in Table 1 or the complement of such sequences. The marker nucleic acids also can be RNA comprising the sequences listed in Table 1 or the complement of such sequence, wherein all thymidine residues are replaced with uridine residues. A “marker protein” is a protein encoded by or corresponding to a marker of the invention. A marker protein comprises the sequence of any of the sequences listed in Table 1. The terms “protein” and “polypeptide’ are used interchangeably.

[0085] The term “probe” refers to any molecule which is capable of selectively binding to a specifically intended target molecule, for example, a nucleotide transcript or protein encoded by or corresponding to a marker. Probes can be either synthesized by one skilled in the art, or derived from appropriate biological preparations. For purposes of detection of the target molecule, probes may be specifically designed to be labeled, as described herein. Examples of molecules that can be utilized as probes include, but are not limited to, RNA, DNA, proteins, antibodies, and organic molecules.

[0086] An “ovary-associated” body fluid is a fluid which, when in the body of a patient, contacts or passes through ovarian cells or into which cells or proteins shed from ovarian cells e.g. ovarian epithelium, are capable of passing. Exemplary ovary-associated body fluids include blood fluids, lymph, ascites, gynecological fluids, cystic fluid, urine, and fluids collected by peritoneal rinsing.

[0087] The “normal” level of expression of a marker is the level of expression of the marker in ovarian cells of a human subject or patient not afflicted with ovarian cancer

[0088] An “over-expression” or “significantly higher level of expression” of a marker refers to an expression level in a test sample that is greater than the standard error of the assay employed to assess expression, and is preferably at least twice, and more preferably three, four, five or ten times the expression level of the marker in a control sample (e.g., sample from a healthy subjects not having the marker associated disease) and preferably, the average expression level of the marker in several control samples.

[0089] As used herein, the term “promoter/regulatory sequence” means a nucleic acid sequence which is required for expression of a gene product operably linked to the promoter/regulatory sequence. In some instances, this sequence may be the core promoter sequence and in other instances, this sequence may also include an enhancer sequence and other regulatory elements which are required for expression of the gene product. The promoter/regulatory sequence may, for example, be one which expresses the gene product in a tissue-specific manner.

[0090] A “constitutive” promoter is a nucleotide sequence which, when operably linked with a polynucleotide which encodes or specifies a gene product, causes the gene product to be produced in a living human cell under most or all physiological conditions of the cell.

[0091] An “inducible” promoter is a nucleotide sequence which, when operably linked with a polynucleotide which encodes or specifies a gene product, causes the gene product to be produced in a living human cell substantially only when an inducer which corresponds to the promoter is present in the cell.

[0092] A “tissue-specific” promoter is a nucleotide sequence which, when operably linked with a polynucleotide which encodes or specifies a gene product, causes the gene product to be produced in a living human cell substantially only if the cell is a cell of the tissue type corresponding to the promoter.

[0093] A “transcribed polynucleotide” or “nucleotide transcript” is a polynucleotide (e.g. an mRNA, hnRNA, a cDNA, or an analog of such RNA or cDNA) which is complementary to or homologous with all or a portion of a mature mRNA made by transcription of a marker of the invention and normal post-transcriptional processing (e.g. splicing), if any, of the RNA transcript, and reverse transcription of the RNA transcript.

[0094] “Complementary” refers to the broad concept of sequence complementarity between regions of two nucleic acid strands or between two regions of the same nucleic acid strand. It is known that an adenine residue of a first nucleic acid region is capable of forming specific hydrogen bonds (“base pairing”) with a residue of a second nucleic acid region which is antiparallel to the first region if the residue is thymine or uracil. Similarly, it is known that a cytosine residue of a first nucleic acid strand is capable of base pairing with a residue of a second nucleic acid strand which is antiparallel to the first strand if the residue is guanine. A first region of a nucleic acid is complementary to a second region of the same or a different nucleic acid if, when the two regions are arranged in an antiparallel fashion, at least one nucleotide residue of the first region is capable of base pairing with a residue of the second region. Preferably, the first region comprises a first portion and the second region comprises a second portion, whereby, when the first and second portions are arranged in an antiparallel fashion, at least about 50%, and preferably at least about 75%, at least about 90%, or at least about 95% of the nucleotide residues of the first portion are capable of base pairing with nucleotide residues in the second portion. More preferably, all nucleotide residues of the first portion are capable of base pairing with nucleotide residues in the second portion.

[0095] “Homologous” as used herein, refers to nucleotide sequence similarity between two regions of the same nucleic acid strand or between regions of two different nucleic acid strands. When a nucleotide residue position in both regions is occupied by the same nucleotide residue, then the regions are homologous at that position. A first region is homologous to a second region if at least one nucleotide residue position of each region is occupied by the same residue. Homology between two regions is expressed in terms of the proportion of nucleotide residue positions of the two regions that are occupied by the same nucleotide residue. By way of example, a region having the nucleotide sequence 5′-ATTGCC-3′ and a region having the nucleotide sequence 5′-TATGGC-3′ share 50% homology. Preferably, the first region comprises a first portion and the second region comprises a second portion, whereby, at least about 50%, and preferably at least about 75%, at least about 90%, or at least about 95% of the nucleotide residue positions of each of the portions are occupied by the same nucleotide residue. More preferably, all nucleotide residue positions of each of the portions are occupied by the same nucleotide residue.

[0096] A molecule is “fixed” or “affixed” to a substrate if it is covalently or non-covalently associated with the substrate such the substrate can be rinsed with a fluid (e.g. standard saline citrate, pH 7.4) without a substantial fraction of the molecule dissociating from the substrate.

[0097] As used herein, a “naturally-occurring” nucleic acid molecule refers to an RNA or DNA molecule having a nucleotide sequence that occurs in an organism found in nature.

[0098] A cancer is “inhibited” if at least one symptom of the cancer is alleviated, terminated, slowed, or prevented. As used herein, ovarian cancer is also “inhibited” if recurrence or metastasis of the cancer is reduced, slowed, delayed, or prevented.

[0099] A kit is any manufacture (e.g. a package or container) comprising at least one reagent, e.g. a probe, for specifically detecting the expression of a marker of the invention. The kit may be promoted, distributed, or sold as a unit for performing the methods of the present invention.

[0100] “Proteins of the invention” encompass marker proteins and their fragments; variant marker proteins and their fragments; peptides and polypeptides comprising an at least 15 amino acid segment of a marker or variant marker protein; and fusion proteins comprising a marker or variant marker protein, or an at least 15 amino acid segment of a marker or variant marker protein.

[0101] Unless otherwise specified herewithin, the terms “antibody” and “antibodies” broadly encompass naturally-occurring forms of antibodies (e.g., IgG, IgA, IgM, IgE) and recombinant antibodies such as single-chain antibodies, chimeric and humanized antibodies and multi-specific antibodies, as well as fragments and derivatives of all of the foregoing, which fragments and derivatives have at least an antigenic binding site. Antibody derivatives may comprise a protein or chemical moiety conjugated to an antibody moiety.

### Description

[0102] The present invention is based, in part, on newly identified markers which are over-expressed in ovarian cancer cells as compared to their expression in normal (i.e. non-cancerous) ovarian cells. The enhanced expression of one or more of these markers in ovarian cells is herein correlated with the cancerous state of the tissue. The invention provides compositions, kits, and methods for assessing the cancerous state of ovarian cells (e.g. cells obtained from a human, cultured human cells, archived or preserved human cells and in vivo cells) as well as treating patients afflicted with ovarian cancer.

[0103] The compositions, kits, and methods of the invention have the following uses, among others:

[0104] 1) assessing whether a patient is afflicted with ovarian cancer;

[0105] 2) assessing the stage of ovarian cancer in a human patient;

[0106] 3) assessing the grade of ovarian cancer in a patient;

[0107] 4) assessing the benign or malignant nature of ovarian cancer in a patient;

[0108] 5) assessing the metastatic potential of ovarian cancer in a patient;

[0109] 6) assessing the histological type of neoplasm (e.g. serous, mucinous, endometroid, or clear cell neoplasm) associated with ovarian cancer in a patient;

[0110] 7) making antibodies, antibody fragments or antibody derivatives that are useful for treating ovarian cancer and/or assessing whether a patient is afflicted with ovarian cancer;

[0111] 8) assessing the presence of ovarian cancer cells;

[0112] 9) assessing the efficacy of one or more test compounds for inhibiting ovarian cancer in a patient;

[0113] 10) assessing the efficacy of a therapy for inhibiting ovarian cancer in a patient;

[0114] 11) monitoring the progression of ovarian cancer in a patient;

[0115] 12) selecting a composition or therapy for inhibiting ovarian cancer in a patient;

[0116] 13) treating a patient afflicted with ovarian cancer;

[0117] 14) inhibiting ovarian cancer in a patient;

[0118] 15) assessing the ovarian carcinogenic potential of a test compound; and

[0119] 16) preventing the onset of ovarian cancer in a patient at risk for developing ovarian cancer.

[0120] The invention thus includes a method of assessing whether a patient is afflicted with ovarian cancer which includes assessing whether the patient has pre-metastasized ovarian cancer. This method comprises comparing the level of expression of a marker of the invention (listed in Table 1) in a patient sample and the normal level of expression of the marker in a control, e.g., a non-ovarian cancer sample. A significantly higher level of expression of the marker in the patient sample as compared to the normal level is an indication that the patient is afflicted with ovarian cancer.

[0121] Gene delivery vehicles, host cells and compositions (all described herein) containing nucleic acids comprising the entirety, or a segment of 15 or more nucleotides, of any of the sequences listed in Tables 1-3 or the complement of such sequences, and polypeptides comprising the entirety, or a segment of 10 or more amino acids, of any of the sequences listed in Tables 1-3 are also provided by this invention.

[0122] As described herein, ovarian cancer in patients is associated with an increased level of expression of one or more markers of the invention. While, as discussed above, some of these changes in expression level result from occurrence of the ovarian cancer, others of these changes induce, maintain, and promote the cancerous state of ovarian cancer cells. Thus, ovarian cancer characterized by an increase in the level of expression of one or more markers of the invention can be inhibited by reducing and/or interfering with the expression of the markers and/or function of the proteins encoded by those markers.

[0123] Expression of a marker of the invention can be inhibited in a number of ways generally known in the art. For example, an antisense oligonucleotide can be provided to the ovarian cancer cells in order to inhibit transcription, translation, or both, of the marker(s). Alternately, a polynucleotide encoding an antibody, an antibody derivative, or an antibody fragment which specifically binds a marker protein, and operably linked with an appropriate promoter/regulator region, can be provided to the cell in order to generate intracellular antibodies which will inhibit the function or activity of the protein. The expression and/or function of a marker may also be inhibited by treating the ovarian cancer cell with an antibody, antibody derivative or antibody fragment that specifically binds a marker protein. Using the methods described herein, a variety of molecules, particularly including molecules sufficiently small that they are able to cross the cell membrane, can be screened in order to identify molecules which inhibit expression of a marker or inhibit the function of a marker protein. The compound so identified can be provided to the patient in order to inhibit ovarian cancer cells of the patient.

[0124] Any marker or combination of markers of the invention, as well as any known markers in combination with the markers of the invention, may be used in the compositions, kits, and methods of the present invention. In general, it is preferable to use markers for which the difference between the level of expression of the marker in ovarian cancer cells and the level of expression of the same marker in normal ovarian cells is as great as possible. Although this difference can be as small as the limit of detection of the method for assessing expression of the marker, it is preferred that the difference be at least greater than the standard error of the assessment method, and preferably a difference of at least 2-, 3-, 4-, 5-, 6-, 7-, 8-, 9-, 10-, 15-, 20-, 25-, 100-, 500-, 1000-fold or greater than the level of expression of the same marker in normal ovarian tissue.

[0125] It is recognized that certain marker proteins are secreted from ovarian cells (i.e. one or both of normal and cancerous cells) to the extracellular space surrounding the cells. These markers are preferably used in certain embodiments of the compositions, kits, and methods of the invention, owing to the fact that the such marker proteins can be detected in an ovary-associated body fluid sample, which may be more easily collected from a human patient than a tissue biopsy sample. In addition, preferred in vivo techniques for detection of a marker protein include introducing into a subject a labeled antibody directed against the protein. For example, the antibody can be labeled with a radioactive marker whose presence and location in a subject can be detected by standard imaging techniques.

[0126] It is a simple matter for the skilled artisan to determine whether any particular marker protein is a secreted protein. In order to make this determination, the marker protein is expressed in, for example, a mammalian cell, preferably a human ovarian cell line, extracellular fluid is collected, and the presence or absence of the protein in the extracellular fluid is assessed (e.g. using a labeled antibody which binds specifically with the protein).

[0127] The following is an example of a method which can be used to detect secretion of a protein. About 8×10⁵ 293T cells are incubated at 37° C. in wells containing growth medium (Dulbecco's modified Eagle's medium {DMEM} supplemented with 10% fetal bovine serum) under a 5% (v/v) CO₂, 95% air atmosphere to about 60-70% confluence. The cells are then transfected using a standard transfection mixture comprising 2 micrograms of DNA comprising an expression vector encoding the protein and 10 microliters of LipofectAMINE™ (GIBCO/BRL Catalog no. 18342-012) per well. The transfection mixture is maintained for about 5 hours, and then replaced with fresh growth medium and maintained in an air atmosphere. Each well is gently rinsed twice with DMEM which does not contain methionine or cysteine (DMEM-MC; ICN Catalog no. 16-424-54). About 1 milliliter of DMEM-MC and about 50 microcuries of Trans-³⁵S™ reagent (ICN Catalog no. 51006) are added to each well. The wells are maintained under the 5% CO₂ atmosphere described above and incubated at 37° C. for a selected period. Following incubation, 150 microliters of conditioned medium is removed and centrifuged to remove floating cells and debris. The presence of the protein in the supernatant is an indication that the protein is secreted.

[0128] Examples of ovary-associated body fluids include blood fluids (e.g. whole blood, blood serum, blood having platelets removed therefrom, etc.), lymph, ascitic fluids, gynecological fluids (e.g. ovarian, fallopian, and uterine secretions, menses, vaginal douching fluids, fluids used to rinse ovarian cell samples, etc.), cystic fluid, urine, and fluids collected by peritoneal rinsing (e.g. fluids applied and collected during laparoscopy or fluids instilled into and withdrawn from the peritoneal cavity of a human patient). In these embodiments, the level of expression of the marker can be assessed by assessing the amount (e.g. absolute amount or concentration) of the marker protein in an ovary-associated body fluid obtained from a patient. The fluid can, of course, be subjected to a variety of well-known post-collection preparative and storage techniques (e.g. storage, freezing, ultrafiltration, concentration, evaporation, centrifugation, etc.) prior to assessing the amount of the marker in the fluid.

[0129] Many ovary-associated body fluids (i.e. usually excluding urine) can have ovarian cells, e.g. ovarian epithelium, therein, particularly when the ovarian cells are cancerous, and, more particularly, when the ovarian cancer is metastasizing. Cell-containing fluids which can contain ovarian cancer cells include, but are not limited to, peritoneal ascites, fluids collected by peritoneal rinsing, fluids collected by uterine rinsing, uterine fluids such as uterine exudate and menses, pleural fluid, and ovarian exudates. Thus, the compositions, kits, and methods of the invention can be used to detect expression of marker proteins having at least one portion which is displayed on the surface of cells which express it. It is a simple matter for the skilled artisan to determine whether a marker protein, or a portion thereof, is exposed on the cell surface. For example, immunological methods may be used to detect such proteins on whole cells, or well known computer-based sequence analysis methods (e.g. the SIGNALP program; Nielsen et al., 1997, Protein Engineering 10:1-6) may be used to predict the presence of at least one extracellular domain (i.e. including both secreted proteins and proteins having at least one cell-surface domain). Expression of a marker protein having at least one portion which is displayed on the surface of a cell which expresses it may be detected without necessarily lysing the cell (e.g. using a labeled antibody which binds specifically with a cell-surface domain of the protein).

[0130] Expression of a marker of the invention may be assessed by any of a wide variety of well known methods for detecting expression of a transcribed nucleic acid or protein. Non-limiting examples of such methods include immunological methods for detection of secreted, cell-surface, cytoplasmic, or nuclear proteins, protein purification methods, protein function or activity assays, nucleic acid hybridization methods, nucleic acid reverse transcription methods, and nucleic acid amplification methods.

[0131] In a preferred embodiment, expression of a marker is assessed using an antibody (e.g. a radio-labeled, chromophore-labeled, fluorophore-labeled, or enzyme-labeled antibody), an antibody derivative (e.g. an antibody conjugated with a substrate or with the protein or ligand of a protein-ligand pair {e.g. biotin-streptavidin}), or an antibody fragment (e.g. a single-chain antibody, an isolated antibody hypervariable domain, etc.) or derivative which binds specifically with a marker protein or fragment thereof, including a marker protein which has undergone all or a portion of its normal post-translational modification.

[0132] In another preferred embodiment, expression of a marker is assessed by preparing mRNA/cDNA (i. e. a transcribed polynucleotide) from cells in a patient sample, and by hybridizing the mRNA/cDNA with a reference polynucleotide which is a complement of a marker nucleic acid, or a fragment thereof. cDNA can, optionally, be amplified using any of a variety of polymerase chain reaction methods prior to hybridization with the reference polynucleotide; preferably, it is not amplified. Expression of one or more markers can likewise be detected using quantitative PCR to assess the level of expression of the marker(s). Alternatively, any of the many known methods of detecting mutations or variants (e.g. single nucleotide polymorphisms, deletions, etc.) of a marker of the invention may be used to detect occurrence of a marker in a patient.

[0133] In a related embodiment, a mixture of transcribed polynucleotides obtained from the sample is contacted with a substrate having fixed thereto a polynucleotide complementary to or homologous with at least a portion (e.g. at least 7, 10, 15, 20, 25, 30, 40, 50, 100, 500, or more nucleotide residues) of a marker nucleic acid. If polynucleotides complementary to or homologous with several marker nucleic acids are differentially detectable on the substrate (e.g. detectable using different chromophores or fluorophores, or fixed to different selected positions), then the levels of expression of a plurality of markers can be assessed simultaneously using a single substrate (e.g. a “gene chip” microarray of polynucleotides fixed at selected positions). When a method of assessing marker expression is used which involves hybridization of one nucleic acid with another, it is preferred that the hybridization be performed under stringent hybridization conditions.

[0134] Because the compositions, kits, and methods of the invention rely on detection of a difference in expression levels of one or more markers of the invention, it is preferable that the level of expression of the marker is significantly greater than the minimum detection limit of the method used to assess expression in at least one of normal ovarian cells and cancerous ovarian cells.

[0135] It is understood that by routine screening of additional patient samples using one or more of the markers of the invention, it will be realized that certain of the markers are over-expressed in cancers of various types, including specific ovarian cancers, as well as other cancers such as breast cancer, cervical cancer, etc. For example, it will be confirmed that some of the markers of the invention are overexpressed in most (i. e. 50% or more) or substantially all (i. e. 80% or more) of ovarian cancer. Furthermore, it will be confirmed that certain of the markers of the invention are associated with ovarian cancer of various stages (i.e. stage I, II, III, and IV ovarian cancers, as well as subclassifications IA, IB, IC, IIA, IIB, IIC, IIIA, IIIB, and IIIC, using the FIGO Stage Grouping system for primary carcinoma of the ovary; 1987, Am. J Obstet. Gynecol. 156:236), of various histologic subtypes (e.g. serous, mucinous, endometroid, and clear cell subtypes, as well as subclassifications and alternate classifications adenocarcinoma, papillary adenocarcinoma, papillary cystadenocarcinoma, surface papillary carcinoma, malignant adenofibroma, cystadenofibroma, adenocarcinoma, cystadenocarcinoma, adenoacanthoma, endometrioid stromal sarcoma, mesodermal (Müllerian) mixed tumor, mesonephroid tumor, malignant carcinoma, Brenner tumor, mixed epithelial tumor, and undifferentiated carcinoma, using the WHO/FIGO system for classification of malignant ovarian tumors; Scully, Atlas of Tumor Pathology, 3d series, Washington D.C.), and various grades (i.e. grade I {well differentiated}, grade II {moderately well differentiated}, and grade III {poorly differentiated from surrounding normal tissue}). In addition, as a greater number of patient samples are assessed for expression of the markers of the invention and the outcomes of the individual patients from whom the samples were obtained are correlated, it will also be confirmed that increased expression of certain of the markers of the invention are strongly correlated with malignant cancers and that increased expression of other markers of the invention are strongly correlated with benign tumors. The compositions, kits, and methods of the invention are thus useful for characterizing one or more of the stage, grade, histological type, and benign/malignant nature of ovarian cancer in patients. In addition, these compositions, kits, and methods can be used to detect and differentiate epithelial, stromal, and germ cell ovarian cancers.

[0136] When the compositions, kits, and methods of the invention are used for characterizing one or more of the stage, grade, histological type, and benign/malignant nature of ovarian cancer in a patient, it is preferred that the marker or panel of markers of the invention is selected such that a positive result is obtained in at least about 20%, and preferably at least about 40%, 60%, or 80%, and more preferably in substantially all patients afflicted with an ovarian cancer of the corresponding stage, grade, histological type, or benign/malignant nature. Preferably, the marker or panel of markers of the invention is selected such that a PPV of greater than about 10% is obtained for the general population (more preferably coupled with an assay specificity greater than 99.5%).

[0137] When a plurality of markers of the invention are used in the compositions, kits, and methods of the invention, the level of expression of each marker in a patient sample can be compared with the normal level of expression of each of the plurality of markers in non-cancerous samples of the same type, either in a single reaction mixture (i.e. using reagents, such as different fluorescent probes, for each marker) or in individual reaction mixtures corresponding to one or more of the markers. In one embodiment, a significantly increased level of expression of more than one of the plurality of markers in the sample, relative to the corresponding normal levels, is an indication that the patient is afflicted with ovarian cancer. When a plurality of markers is used, it is preferred that 2, 3, 4, 5, 8, 10, 12, 15, 20, 30, or 50 or more individual markers be used, wherein fewer markers are preferred.

[0138] In order to maximize the sensitivity of the compositions, kits, and methods of the invention (i.e. by interference attributable to cells of non-ovarian origin in a patient sample), it is preferable that the marker of the invention used therein be a marker which has a restricted tissue distribution, e.g., normally not expressed in a non-epithelial tissue, and more preferably a marker which is normally not expressed in a non-ovarian tissue.

[0139] Only a small number of markers are known to be associated with ovarian cancers (e.g. AKT2, Ki-RAS, ERBB2, c-MYC, RB1, and TP53; Lynch, supra). These markers are not, of course, included among the markers of the invention, although they may be used together with one or more markers of the invention in a panel of markers, for example. It is well known that certain types of genes, such as oncogenes, tumor suppressor genes, growth factor-like genes, protease-like genes, and protein kinase-like genes are often involved with development of cancers of various types. Thus, among the markers of the invention, use of those which correspond to proteins which resemble proteins encoded by known oncogenes and tumor suppressor genes, and those which correspond to proteins which resemble growth factors, proteases, and protein kinases are preferred.

[0140] It is recognized that the compositions, kits, and methods of the invention will be of particular utility to patients having an enhanced risk of developing ovarian cancer and their medical advisors. Patients recognized as having an enhanced risk of developing ovarian cancer include, for example, patients having a familial history of ovarian cancer, patients identified as having a mutant oncogene (i.e. at least one allele), and patients of advancing age (i.e. women older than about 50 or 60 years).

[0141] The level of expression of a marker in normal (i.e. non-cancerous) human ovarian tissue can be assessed in a variety of ways. In one embodiment, this normal level of expression is assessed by assessing the level of expression of the marker in a portion of ovarian cells which appears to be non-cancerous and by comparing this normal level of expression with the level of expression in a portion of the ovarian cells which is suspected of being cancerous. For example, when laparoscopy or other medical procedure, reveals the presence of a lump on one portion of a patient's ovary, but not on another portion of the same ovary or on the other ovary, the normal level of expression of a marker may be assessed using one or both or the non-affected ovary and a non-affected portion of the affected ovary, and this normal level of expression may be compared with the level of expression of the same marker in an affected portion (i.e. the lump) of the affected ovary. Alternately, and particularly as further information becomes available as a result of routine performance of the methods described herein, population-average values for normal expression of the markers of the invention may be used. In other embodiments, the ‘normal’ level of expression of a marker may be determined by assessing expression of the marker in a patient sample obtained from a non-cancer-afflicted patient, from a patient sample obtained from a patient before the suspected onset of ovarian cancer in the patient, from archived patient samples, and the like.

[0142] The invention includes compositions, kits, and methods for assessing the presence of ovarian cancer cells in a sample (e.g. an archived tissue sample or a sample obtained from a patient). These compositions, kits, and methods are substantially the same as those described above, except that, where necessary, the compositions, kits, and methods are adapted for use with samples other than patient samples. For example, when the sample to be used is a parafinized, archived human tissue sample, it can be necessary to adjust the ratio of compounds in the compositions of the invention, in the kits of the invention, or the methods used to assess levels of marker expression in the sample. Such methods are well known in the art and within the skill of the ordinary artisan.

[0143] The invention includes a kit for assessing the presence of ovarian cancer cells (e.g. in a sample such as a patient sample). The kit comprises a plurality of reagents, each of which is capable of binding specifically with a marker nucleic acid or protein. Suitable reagents for binding with a marker protein include antibodies, antibody derivatives, antibody fragments, and the like. Suitable reagents for binding with a marker nucleic acid (e.g. a genomic DNA, an mRNA, a spliced mRNA, a cDNA, or the like) include complementary nucleic acids. For example, the nucleic acid reagents may include oligonucleotides (labeled or non-labeled) fixed to a substrate, labeled oligonucleotides not bound with a substrate, pairs of PCR primers, molecular beacon probes, and the like.

[0144] The kit of the invention may optionally comprise additional components useful for performing the methods of the invention. By way of example, the kit may comprise fluids (e.g. SSC buffer) suitable for annealing complementary nucleic acids or for binding an antibody with a protein with which it specifically binds, one or more sample compartments, an instructional material which describes performance of a method of the invention, a sample of normal ovarian cells, a sample of ovarian cancer cells, and the like.

[0145] The invention also includes a method of making an isolated hybridoma which produces an antibody useful for assessing whether patient is afflicted with an ovarian cancer. In this method, a protein or peptide comprising the entirety or a segment of a marker protein is synthesized or isolated (e.g. by purification from a cell in which it is expressed or by transcription and translation of a nucleic acid encoding the protein or peptide in vivo or in vitro using known methods). A vertebrate, preferably a mammal such as a mouse, rat, rabbit, or sheep, is immunized using the protein or peptide. The vertebrate may optionally (and preferably) be immunized at least one additional time with the protein or peptide, so that the vertebrate exhibits a robust immune response to the protein or peptide. Splenocytes are isolated from the immunized vertebrate and fused with an immortalized cell line to form hybridomas, using any of a variety of methods well known in the art. Hybridomas formed in this manner are then screened using standard methods to identify one or more hybridomas which produce an antibody which specifically binds with the marker protein or a fragment thereof. The invention also includes hybridomas made by this method and antibodies made using such hybridomas.

[0146] The invention also includes a method of assessing the efficacy of a test compound for inhibiting ovarian cancer cells. As described above, differences in the level of expression of the markers of the invention correlate with the cancerous state of ovarian cells. Although it is recognized that changes in the levels of expression of certain of the markers of the invention likely result from the cancerous state of ovarian cells, it is likewise recognized that changes in the levels of expression of other of the markers of the invention induce, maintain, and promote the cancerous state of those cells. Thus, compounds which inhibit an ovarian cancer in a patient will cause the level of expression of one or more of the markers of the invention to change to a level nearer the normal level of expression for that marker (i.e. the level of expression for the marker in non-cancerous ovarian cells).

[0147] This method thus comprises comparing expression of a marker in a first ovarian cell sample and maintained in the presence of the test compound and expression of the marker in a second ovarian cell sample and maintained in the absence of the test compound. A significantly reduced expression of a marker of the invention in the presence of the test compound is an indication that the test compound inhibits ovarian cancer. The ovarian cell samples may, for example, be aliquots of a single sample of normal ovarian cells obtained from a patient, pooled samples of normal ovarian cells obtained from a patient, cells of a normal ovarian cell line, aliquots of a single sample of ovarian cancer cells obtained from a patient, pooled samples of ovarian cancer cells obtained from a patient, cells of an ovarian cancer cell line, or the like. In one embodiment, the samples are ovarian cancer cells obtained from a patient and a plurality of compounds known to be effective for inhibiting various ovarian cancers are tested in order to identify the compound which is likely to best inhibit the ovarian cancer in the patient.

[0148] This method may likewise be used to assess the efficacy of a therapy for inhibiting ovarian cancer in a patient. In this method, the level of expression of one or more markers of the invention in a pair of samples (one subjected to the therapy, the other not subjected to the therapy) is assessed. As with the method of assessing the efficacy of test compounds, if the therapy induces a significantly lower level of expression of a marker of the invention then the therapy is efficacious for inhibiting ovarian cancer. As above, if samples from a selected patient are used in this method, then alternative therapies can be assessed in vitro in order to select a therapy most likely to be efficacious for inhibiting ovarian cancer in the patient.

[0149] As described above, the cancerous state of human ovarian cells is correlated with changes in the levels of expression of the markers of the invention. The invention includes a method for assessing the human ovarian cell carcinogenic potential of a test compound. This method comprises maintaining separate aliquots of human ovarian cells in the presence and absence of the test compound. Expression of a marker of the invention in each of the aliquots is compared. A significantly higher level of expression of a marker of the invention in the aliquot maintained in the presence of the test compound (relative to the aliquot maintained in the absence of the test compound) is an indication that the test compound possesses human ovarian cell carcinogenic potential. The relative carcinogenic potentials of various test compounds can be assessed by comparing the degree of enhancement or inhibition of the level of expression of the relevant markers, by comparing the number of markers for which the level of expression is enhanced or inhibited, or by comparing both.

[0150] Various aspects of the invention are described in further detail in the following subsections.

[0151] I. Isolated Nucleic Acid Molecules

[0152] One aspect of the invention pertains to isolated nucleic acid molecules, including nucleic acids which encode a marker protein or a portion thereof. Isolated nucleic acids of the invention also include nucleic acid molecules sufficient for use as hybridization probes to identify marker nucleic acid molecules, and fragments of marker nucleic acid molecules, e.g., those suitable for use as PCR primers for the amplification or mutation of marker nucleic acid molecules. As used herein, the term “nucleic acid molecule” is intended to include DNA molecules (e.g., cDNA or genomic DNA) and RNA molecules (e.g., mRNA) and analogs of the DNA or RNA generated using nucleotide analogs. The nucleic acid molecule can be single-stranded or double-stranded, but preferably is double-stranded DNA.

[0153] An “isolated” nucleic acid molecule is one which is separated from other nucleic acid molecules which are present in the natural source of the nucleic acid molecule. Preferably, an “isolated” nucleic acid molecule is free of sequences (preferably protein-encoding sequences) which naturally flank the nucleic acid (i.e., sequences located at the 5′ and 3′ ends of the nucleic acid) in the genomic DNA of the organism from which the nucleic acid is derived. For example, in various embodiments, the isolated nucleic acid molecule can contain less than about 5 kB, 4 kB, 3 kB, 2 kB, 1 kB, 0.5 kB or 0.1 kB of nucleotide sequences which naturally flank the nucleic acid molecule in genomic DNA of the cell from which the nucleic acid is derived. Moreover, an “isolated” nucleic acid molecule, such as a cDNA molecule, can be substantially free of other cellular material, or culture medium when produced by recombinant techniques, or substantially free of chemical precursors or other chemicals when chemically synthesized.

[0154] A nucleic acid molecule of the present invention can be isolated using standard molecular biology techniques and the sequence information in the database records described herein. Using all or a portion of such nucleic acid sequences, nucleic acid molecules of the invention can be isolated using standard hybridization and cloning techniques (e.g., as described in Sambrook et al., ed., Molecular Cloning: A Laboratory Manual, 2nd ed., Cold Spring Harbor Laboratory Press, Cold Spring Harbor, N.Y., 1989).

[0155] A nucleic acid molecule of the invention can be amplified using cDNA, mRNA, or genomic DNA as a template and appropriate oligonucleotide primers according to standard PCR amplification techniques. The nucleic acid so amplified can be cloned into an appropriate vector and characterized by DNA sequence analysis. Furthermore, nucleotides corresponding to all or a portion of a nucleic acid molecule of the invention can be prepared by standard synthetic techniques, e.g., using an automated DNA synthesizer.

[0156] In another preferred embodiment, an isolated nucleic acid molecule of the invention comprises a nucleic acid molecule which has a nucleotide sequence complementary to the nucleotide sequence of a marker nucleic acid or to the nucleotide sequence of a nucleic acid encoding a marker protein. A nucleic acid molecule which is complementary to a given nucleotide sequence is one which is sufficiently complementary to the given nucleotide sequence that it can hybridize to the given nucleotide sequence thereby forming a stable duplex.

[0157] Moreover, a nucleic acid molecule of the invention can comprise only a portion of a nucleic acid sequence, wherein the full length nucleic acid sequence comprises a marker nucleic acid or which encodes a marker protein. Such nucleic acids can be used, for example, as a probe or primer. The probe/primer typically is used as one or more substantially purified oligonucleotides. The oligonucleotide typically comprises a region of nucleotide sequence that hybridizes under stringent conditions to at least about 7, preferably about 15, more preferably about 25, 50, 75, 100, 125, 150, 175, 200, 250, 300, 350, or 400 or more consecutive nucleotides of a nucleic acid of the invention.

[0158] Probes based on the sequence of a nucleic acid molecule of the invention can be used to detect transcripts or genomic sequences corresponding to one or more markers of the invention. The probe comprises a label group attached thereto, e.g., a radioisotope, a fluorescent compound, an enzyme, or an enzyme co-factor. Such probes can be used as part of a diagnostic test kit for identifying cells or tissues which misexpress the protein, such as by measuring levels of a nucleic acid molecule encoding the protein in a sample of cells from a subject, e.g., detecting mRNA levels or determining whether a gene encoding the protein has been mutated or deleted.

[0159] The invention further encompasses nucleic acid molecules that differ, due to degeneracy of the genetic code, from the nucleotide sequence of nucleic acids encoding a marker protein and thus encode the same protein.

[0160] It will be appreciated by those skilled in the art that DNA sequence polymorphisms that lead to changes in the amino acid sequence can exist within a population (e.g., the human population). Such genetic polymorphisms can exist among individuals within a population due to natural allelic variation. An allele is one of a group of genes which occur alternatively at a given genetic locus. In addition, it will be appreciated that DNA polymorphisms that affect RNA expression levels can also exist that may affect the overall expression level of that gene (e.g., by affecting regulation or degradation).

[0161] As used herein, the phrase “allelic variant” refers to a nucleotide sequence which occurs at a given locus or to a polypeptide encoded by the nucleotide sequence.

[0162] As used herein, the terms “gene” and “recombinant gene” refer to nucleic acid molecules comprising an open reading frame encoding a polypeptide corresponding to a marker of the invention. Such natural allelic variations can typically result in 1-5% variance in the nucleotide sequence of a given gene. Alternative alleles can be identified by sequencing the gene of interest in a number of different individuals. This can be readily carried out by using hybridization probes to identify the same genetic locus in a variety of individuals. Any and all such nucleotide variations and resulting amino acid polymorphisms or variations that are the result of natural allelic variation and that do not alter the functional activity are intended to be within the scope of the invention.

[0163] In another embodiment, an isolated nucleic acid molecule of the invention is at least 7, 15, 20, 25, 30, 40, 60, 80, 100, 150, 200, 250, 300, 350, 400, 450, 550, 650, 700, 800, 900, 1000, 1200, 1400, 1600, 1800, 2000, 2200, 2400, 2600, 2800, 3000, 3500, 4000, 4500, or more nucleotides in length and hybridizes under stringent conditions to a marker nucleic acid or to a nucleic acid encoding a marker protein. As used herein, the term “hybridizes under stringent conditions” is intended to describe conditions for hybridization and washing under which nucleotide sequences at least 60% (65%, 70%, preferably 75%) identical to each other typically remain hybridized to each other. Such stringent conditions are known to those skilled in the art and can be found in sections 6.3.1-6.3.6 of Current Protocols in Molecular Biology, John Wiley & Sons, N.Y. (1989). A preferred, non-limiting example of stringent hybridization conditions are hybridization in 6×sodium chloride/sodium citrate (SSC) at about 45° C., followed by one or more washes in 0.2×SSC, 0.1% SDS at 50-65° C.

[0164] In addition to naturally-occurring allelic variants of a nucleic acid molecule of the invention that can exist in the population, the skilled artisan will further appreciate that sequence changes can be introduced by mutation thereby leading to changes in the amino acid sequence of the encoded protein, without altering the biological activity of the protein encoded thereby. For example, one can make nucleotide substitutions leading to amino acid substitutions at “non-essential” amino acid residues. A “non-essential” amino acid residue is a residue that can be altered from the wild-type sequence without altering the biological activity, whereas an “essential” amino acid residue is required for biological activity. For example, amino acid residues that are not conserved or only semi-conserved among homologs of various species may be non-essential for activity and thus would be likely targets for alteration. Alternatively, amino acid residues that are conserved among the homologs of various species (e.g., murine and human) may be essential for activity and thus would not be likely targets for alteration.

[0165] Accordingly, another aspect of the invention pertains to nucleic acid molecules encoding a variant marker protein that contain changes in amino acid residues that are not essential for activity. Such variant marker proteins differ in amino acid sequence from the naturally-occurring marker proteins, yet retain biological activity. In one embodiment, such a variant marker protein has an amino acid sequence that is at least about 40% identical, 50%, 60%, 70%, 80%, 90%, 95%, or 98% identical to the amino acid sequence of a marker protein.

[0166] An isolated nucleic acid molecule encoding a variant marker protein can be created by introducing one or more nucleotide substitutions, additions or deletions into the nucleotide sequence of marker nucleic acids, such that one or more amino acid residue substitutions, additions, or deletions are introduced into the encoded protein. Mutations can be introduced by standard techniques, such as site-directed mutagenesis and PCR-mediated mutagenesis. Preferably, conservative amino acid substitutions are made at one or more predicted non-essential amino acid residues. A “conservative amino acid substitution” is one in which the amino acid residue is replaced with an amino acid residue having a similar side chain. Families of amino acid residues having similar side chains have been defined in the art. These families include amino acids with basic side chains (e.g., lysine, arginine, histidine), acidic side chains (e.g., aspartic acid, glutamic acid), uncharged polar side chains (e.g., glycine, asparagine, glutamine, serine, threonine, tyrosine, cysteine), non-polar side chains (e.g., alanine, valine, leucine, isoleucine, proline, phenylalanine, methionine, tryptophan), beta-branched side chains (e.g., threonine, valine, isoleucine) and aromatic side chains (e.g., tyrosine, phenylalanine, tryptophan, histidine). Alternatively, mutations can be introduced randomly along all or part of the coding sequence, such as by saturation mutagenesis, and the resultant mutants can be screened for biological activity to identify mutants that retain activity. Following mutagenesis, the encoded protein can be expressed recombinantly and the activity of the protein can be determined.

[0167] The present invention encompasses antisense nucleic acid molecules, i.e., molecules which are complementary to a sense nucleic acid of the invention, e.g., complementary to the coding strand of a double-stranded marker cDNA molecule or complementary to a marker mRNA sequence. Accordingly, an antisense nucleic acid of the invention can hydrogen bond to (i.e. anneal with) a sense nucleic acid of the invention. The antisense nucleic acid can be complementary to an entire coding strand, or to only a portion thereof, e.g., all or part of the protein coding region (or open reading frame). An antisense nucleic acid molecule can also be antisense to all or part of a non-coding region of the coding strand of a nucleotide sequence encoding a marker protein. The non-coding regions (“5′ and 3′ untranslated regions”) are the 5′ and 3′ sequences which flank the coding region and are not translated into amino acids.

[0168] An antisense oligonucleotide can be, for example, about 5, 10, 15, 20, 25, 30, 35, 40, 45, or 50 or more nucleotides in length. An antisense nucleic acid of the invention can be constructed using chemical synthesis and enzymatic ligation reactions using procedures known in the art. For example, an antisense nucleic acid (e.g., an antisense oligonucleotide) can be chemically synthesized using naturally occurring nucleotides or variously modified nucleotides designed to increase the biological stability of the molecules or to increase the physical stability of the duplex formed between the antisense and sense nucleic acids, e.g., phosphorothioate derivatives and acridine substituted nucleotides can be used. Examples of modified nucleotides which can be used to generate the antisense nucleic acid include 5-fluorouracil, 5-bromouracil, 5-chlorouracil, 5-iodouracil, hypoxanthine, xanthine, 4-acetylcytosine, 5-(carboxyhydroxylmethyl) uracil, 5-carboxymethylaminomethyl-2-thiouridine, 5-carboxymethylaminomethyluracil, dihydrouracil, beta-D-galactosylqueosine, inosine, N6-isopentenyladenine, 1-methylguanine, 1-methylinosine, 2,2-dimethylguanine, 2-methyladenine, 2-methylguanine, 3-methylcytosine, 5-methylcytosine, N6-adenine, 7-methylguanine, 5-methylaminomethyluracil, 5-methoxyaminomethyl-2-thiouracil, beta-D-mannosylqueosine, 5′-methoxycarboxymethyluracil, 5-methoxyuracil, 2-methylthio-N6-isopentenyladenine, uracil-5-oxyacetic acid (v), wybutoxosine, pseudouracil, queosine, 2-thiocytosine, 5-methyl-2-thiouracil, 2-thiouracil, 4-thiouracil, 5-methyluracil, uracil-5-oxyacetic acid methylester, uracil-5-oxyacetic acid (v), 5-methyl-2-thiouracil, 3-(3-amino-3-N-2-carboxypropyl) uracil, (acp3)w, and 2,6-diaminopurine. Alternatively, the antisense nucleic acid can be produced biologically using an expression vector into which a nucleic acid has been sub-cloned in an antisense orientation (i.e., RNA transcribed from the inserted nucleic acid will be of an antisense orientation to a target nucleic acid of interest, described further in the following subsection).

[0169] The antisense nucleic acid molecules of the invention are typically administered to a subject or generated in situ such that they hybridize with or bind to cellular mRNA and/or genomic DNA encoding a marker protein to thereby inhibit expression of the marker, e.g., by inhibiting transcription and/or translation. The hybridization can be by conventional nucleotide complementarity to form a stable duplex, or, for example, in the case of an antisense nucleic acid molecule which binds to DNA duplexes, through specific interactions in the major groove of the double helix. Examples of a route of administration of antisense nucleic acid molecules of the invention includes direct injection at a tissue site or infusion of the antisense nucleic acid into an ovary-associated body fluid. Alternatively, antisense nucleic acid molecules can be modified to target selected cells and then administered systemically. For example, for systemic administration, antisense molecules can be modified such that they specifically bind to receptors or antigens expressed on a selected cell surface, e.g., by linking the antisense nucleic acid molecules to peptides or antibodies which bind to cell surface receptors or antigens. The antisense nucleic acid molecules can also be delivered to cells using the vectors described herein. To achieve sufficient intracellular concentrations of the antisense molecules, vector constructs in which the antisense nucleic acid molecule is placed under the control of a strong pol II or pol III promoter are preferred.

[0170] An antisense nucleic acid molecule of the invention can be an α-anomeric nucleic acid molecule. An a-anomeric nucleic acid molecule forms specific double-stranded hybrids with complementary RNA in which, contrary to the usual α-units, the strands run parallel to each other (Gaultier et al., 1987, Nucleic Acids Res. 15:6625-6641). The antisense nucleic acid molecule can also comprise a 2′-o-methylribonucleotide (Inoue et al., 1987, Nucleic Acids Res. 15:6131-6148) or a chimeric RNA-DNA analogue (Inoue et al., 1987, FEBS Lett. 215:327-330).

[0171] The invention also encompasses ribozymes. Ribozymes are catalytic RNA molecules with ribonuclease activity which are capable of cleaving a single-stranded nucleic acid, such as an mRNA, to which they have a complementary region. Thus, ribozymes (e.g., hammerhead ribozymes as described in Haselhoff and Gerlach, 1988, Nature 334:585-591) can be used to catalytically cleave mRNA transcripts to thereby inhibit translation of the protein encoded by the mRNA. A ribozyme having specificity for a nucleic acid molecule encoding a marker protein can be designed based upon the nucleotide sequence of a cDNA corresponding to the marker. For example, a derivative of a Tetrahymena L-19 IVS RNA can be constructed in which the nucleotide sequence of the active site is complementary to the nucleotide sequence to be cleaved (see Cech et al. U.S. Pat. No. 4,987,071; and Cech et al. U.S. Pat. No. 5,116,742). Alternatively, an mRNA encoding a polypeptide of the invention can be used to select a catalytic RNA having a specific ribonuclease activity from a pool of RNA molecules (see, e.g., Bartel and Szostak, 1993, Science 261:1411-1418).

[0172] The invention also encompasses nucleic acid molecules which form triple helical structures. For example, expression of a marker of the invention can be inhibited by targeting nucleotide sequences complementary to the regulatory region of the gene encoding the marker nucleic acid or protein (e.g., the promoter and/or enhancer) to form triple helical structures that prevent transcription of the gene in target cells. See generally Helene (1991) Anticancer Drug Des. 6(6):569-84; Helene (1992) Ann. N.Y. Acad. Sci. 660:27-36; and Maher (1992) Bioassays 14(12):807-15.

[0173] In various embodiments, the nucleic acid molecules of the invention can be modified at the base moiety, sugar moiety or phosphate backbone to improve, e.g., the stability, hybridization, or solubility of the molecule. For example, the deoxyribose phosphate backbone of the nucleic acids can be modified to generate peptide nucleic acids (see Hyrup et al., 1996, Bioorganic & Medicinal Chemistry 4(1): 5-23). As used herein, the terms “peptide nucleic acids” or “PNAs” refer to nucleic acid mimics, e.g., DNA mimics, in which the deoxyribose phosphate backbone is replaced by a pseudopeptide backbone and only the four natural nucleobases are retained. The neutral backbone of PNAs has been shown to allow for specific hybridization to DNA and RNA under conditions of low ionic strength. The synthesis of PNA oligomers can be performed using standard solid phase peptide synthesis protocols as described in Hyrup et al. (1996), supra; Perry-O'Keefe et al. (1996) Proc. Natl. Acad. Sci. USA 93:14670-675.

[0174] PNAs can be used in therapeutic and diagnostic applications. For example, PNAs can be used as antisense or antigene agents for sequence-specific modulation of gene expression by, e.g., inducing transcription or translation arrest or inhibiting replication. PNAs can also be used, e.g., in the analysis of single base pair mutations in a gene by, e.g., PNA directed PCR clamping; as artificial restriction enzymes when used in combination with other enzymes, e.g., S1 nucleases (Hyrup (1996), supra; or as probes or primers for DNA sequence and hybridization (Hyrup, 1996, supra; Perry-O'Keefe et al., 1996, Proc. Natl. Acad. Sci. USA 93:14670-675).

[0175] In another embodiment, PNAs can be modified, e.g., to enhance their stability or cellular uptake, by attaching lipophilic or other helper groups to PNA, by the formation of PNA-DNA chimeras, or by the use of liposomes or other techniques of drug delivery known in the art. For example, PNA-DNA chimeras can be generated which can combine the advantageous properties of PNA and DNA. Such chimeras allow DNA recognition enzymes, e.g., RNase H and DNA polymerases, to interact with the DNA portion while the PNA portion would provide high binding affinity and specificity. PNA-DNA chimeras can be linked using linkers of appropriate lengths selected in terms of base stacking, number of bonds between the nucleobases, and orientation (Hyrup, 1996, supra). The synthesis of PNA-DNA chimeras can be performed as described in Hyrup (1996), supra, and Finn et al. (1996) Nucleic Acids Res. 24(17):3357-63. For example, a DNA chain can be synthesized on a solid support using standard phosphoramidite coupling chemistry and modified nucleoside analogs. Compounds such as 5′-(4-methoxytrityl)amino-5′-deoxy-thymidine phosphoramidite can be used as a link between the PNA and the 5′ end of DNA (Mag et al, 1989, Nucleic Acids Res. 17:5973-88). PNA monomers are then coupled in a step-wise manner to produce a chimeric molecule with a 5′ PNA segment and a 3′ DNA segment (Finn et al., 1996, Nucleic Acids Res. 24(17):3357-63). Alternatively, chimeric molecules can be synthesized with a 5′ DNA segment and a 3′ PNA segment (Peterser et al., 1975, Bioorganic Med. Chem. Lett. 5:1119-11124).

[0176] In other embodiments, the oligonucleotide can include other appended groups such as peptides (e.g., for targeting host cell receptors in vivo), or agents facilitating transport across the cell membrane (see, e.g., Letsinger et al., 1989, Proc. Natl. Acad. Sci. USA 86:6553-6556; Lemaitre et al., 1987, Proc. Natl. Acad. Sci. USA 84:648-652; PCT Publication No. WO 88/09810) or the blood-brain barrier (see, e.g., PCT Publication No. WO 89/10134). In addition, oligonucleotides can be modified with hybridization-triggered cleavage agents (see, e.g., Krol et al., 1988, Bio/Techniques 6:958-976) or intercalating agents (see, e.g., Zon, 1988, Pharm. Res. 5:539-549). To this end, the oligonucleotide can be conjugated to another molecule, e.g., a peptide, hybridization triggered cross-linking agent, transport agent, hybridization-triggered cleavage agent, etc.

[0177] The invention also includes molecular beacon nucleic acids having at least one region which is complementary to a nucleic acid of the invention, such that the molecular beacon is useful for quantitating the presence of the nucleic acid of the invention in a sample. A “molecular beacon” nucleic acid is a nucleic acid comprising a pair of complementary regions and having a fluorophore and a fluorescent quencher associated therewith. The fluorophore and quencher are associated with different portions of the nucleic acid in such an orientation that when the complementary regions are annealed with one another, fluorescence of the fluorophore is quenched by the quencher. When the complementary regions of the nucleic acid are not annealed with one another, fluorescence of the fluorophore is quenched to a lesser degree. Molecular beacon nucleic acids are described, for example, in U.S. Pat. No. 5,876,930.

[0178] II. Isolated Proteins and Antibodies

[0179] One aspect of the invention pertains to isolated marker proteins and biologically active portions thereof, as well as polypeptide fragments suitable for use as immunogens to raise antibodies directed against a marker protein or a fragment thereof. In one embodiment, the native marker protein can be isolated from cells or tissue sources by an appropriate purification scheme using standard protein purification techniques. In another embodiment, a protein or peptide comprising the whole or a segment of the marker protein is produced by recombinant DNA techniques. Alternative to recombinant expression, such protein or peptide can be synthesized chemically using standard peptide synthesis techniques.

[0180] An “isolated” or “purified” protein or biologically active portion thereof is substantially free of cellular material or other contaminating proteins from the cell or tissue source from which the protein is derived, or substantially free of chemical precursors or other chemicals when chemically synthesized. The language “substantially free of cellular material” includes preparations of protein in which the protein is separated from cellular components of the cells from which it is isolated or recombinantly produced. Thus, protein that is substantially free of cellular material includes preparations of protein having less than about 30%, 20%, 10%, or 5% (by dry weight) of heterologous protein (also referred to herein as a “contaminating protein”). When the protein or biologically active portion thereof is recombinantly produced, it is also preferably substantially free of culture medium, i.e., culture medium represents less than about 20%, 10%, or 5% of the volume of the protein preparation. When the protein is produced by chemical synthesis, it is preferably substantially free of chemical precursors or other chemicals, i.e., it is separated from chemical precursors or other chemicals which are involved in the synthesis of the protein. Accordingly such preparations of the protein have less than about 30%, 20%, 10%, 5% (by dry weight) of chemical precursors or compounds other than the polypeptide of interest.

[0181] Biologically active portions of a marker protein include polypeptides comprising amino acid sequences sufficiently identical to or derived from the amino acid sequence of the marker protein, which include fewer amino acids than the full length protein, and exhibit at least one activity of the corresponding full-length protein. Typically, biologically active portions comprise a domain or motif with at least one activity of the corresponding full-length protein. A biologically active portion of a marker protein of the invention can be a polypeptide which is, for example, 10, 25, 50, 100 or more amino acids in length. Moreover, other biologically active portions, in which other regions of the marker protein are deleted, can be prepared by recombinant techniques and evaluated for one or more of the functional activities of the native form of the marker protein.

[0182] Preferred marker proteins are encoded by nucleotide sequences comprising the sequences listed in Tables 1-3. Other useful proteins are substantially identical (e.g., at least about 40%, preferably 50%, 60%, 70%, 80%, 90%, 95%, or 99%) to one of these sequences and retain the functional activity of the corresponding naturally-occurring marker protein yet differ in amino acid sequence due to natural allelic variation or mutagenesis.

[0183] To determine the percent identity of two amino acid sequences or of two nucleic acids, the sequences are aligned for optimal comparison purposes (e.g., gaps can be introduced in the sequence of a first amino acid or nucleic acid sequence for optimal alignment with a second amino or nucleic acid sequence). The amino acid residues or nucleotides at corresponding amino acid positions or nucleotide positions are then compared. When a position in the first sequence is occupied by the same amino acid residue or nucleotide as the corresponding position in the second sequence, then the molecules are identical at that position. The percent identity between the two sequences is a function of the number of identical positions shared by the sequences (i.e., % identity=# of identical positions/total # of positions (e.g., overlapping positions)×100). In one embodiment the two sequences are the same length.

[0184] The determination of percent identity between two sequences can be accomplished using a mathematical algorithm. A preferred, non-limiting example of a mathematical algorithm utilized for the comparison of two sequences is the algorithm of Karlin and Altschul (1990) Proc. Natl. Acad. Sci. USA 87:2264-2268, modified as in Karlin and Altschul (1993) Proc. Natl. Acad Sci. USA 90:5873-5877. Such an algorithm is incorporated into the BLASTN and BLASTX programs of Altschul, et al. (1990) J. Mol. Biol. 215:403-410. BLAST nucleotide searches can be performed with the BLASTN program, score=100, wordlength=12 to obtain nucleotide sequences homologous to a nucleic acid molecules of the invention. BLAST protein searches can be performed with the BLASTP program, score=50, wordlength=3 to obtain amino acid sequences homologous to a protein molecules of the invention. To obtain gapped alignments for comparison purposes, a newer version of the BLAST algorithm called Gapped BLAST can be utilized as described in Altschul et al. (1997) Nucleic Acids Res. 25:3389-3402, which is able to perform gapped local alignments for the programs BLASTN, BLASTP and BLASTX. Alternatively, PSI-Blast can be used to perform an iterated search which detects distant relationships between molecules. When utilizing BLAST, Gapped BLAST, and PSI-Blast programs, the default parameters of the respective programs (e.g., BLASTX and BLASTN) can be used. Another preferred, non-limiting example of a mathematical algorithm utilized for the comparison of sequences is the algorithm of Myers and Miller, (1988) CABIOS 4:11-17. Such an algorithm is incorporated into the ALIGN program (version 2.0) which is part of the GCG sequence alignment software package. When utilizing the ALIGN program for comparing amino acid sequences, a PAM120 weight residue table, a gap length penalty of 12, and a gap penalty of 4 can be used. Yet another useful algorithm for identifying regions of local sequence similarity and alignment is the FASTA algorithm as described in Pearson and Lipman (1988) Proc. Natl. Acad. Sci. USA 85:2444-2448. When using the FASTA algorithm for comparing nucleotide or amino acid sequences, a PAM120 weight residue table can, for example, be used with a k-tuple value of 2.

[0185] The percent identity between two sequences can be determined using techniques similar to those described above, with or without allowing gaps. In calculating percent identity, only exact matches are counted.

[0186] The invention also provides chimeric or fusion proteins comprising a marker protein or a segment thereof. As used herein, a “chimeric protein” or “fusion protein” comprises all or part (preferably a biologically active part) of a marker protein operably linked to a heterologous polypeptide (i.e., a polypeptide other than the marker protein). Within the fusion protein, the term “operably linked” is intended to indicate that the marker protein or segment thereof and the heterologous polypeptide are fused in-frame to each other. The heterologous polypeptide can be fused to the amino-terminus or the carboxyl-terminus of the marker protein or segment.

[0187] One useful fusion protein is a GST fusion protein in which a marker protein or segment is fused to the carboxyl terminus of GST sequences. Such fusion proteins can facilitate the purification of a recombinant polypeptide of the invention.

[0188] In another embodiment, the fusion protein contains a heterologous signal sequence at its amino terminus. For example, the native signal sequence of a marker protein can be removed and replaced with a signal sequence from another protein. For example, the gp67 secretory sequence of the baculovirus envelope protein can be used as a heterologous signal sequence (Ausubel et al., ed., Current Protocols in Molecular Biology, John Wiley & Sons, N.Y., 1992). Other examples of eukaryotic heterologous signal sequences include the secretory sequences of melittin and human placental alkaline phosphatase (Stratagene; La Jolla, Calif.). In yet another example, useful prokaryotic heterologous signal sequences include the phoA secretory signal (Sambrook et al, supra) and the protein A secretory signal (Pharmacia Biotech; Piscataway, N.J.).

[0189] In yet another embodiment, the fusion protein is an immunoglobulin fusion protein in which all or part of a marker protein is fused to sequences derived from a member of the immunoglobulin protein family. The immunoglobulin fusion proteins of the invention can be incorporated into pharmaceutical compositions and administered to a subject to inhibit an interaction between a ligand (soluble or membrane-bound) and a protein on the surface of a cell (receptor), to thereby suppress signal transduction in vivo. The immunoglobulin fusion protein can be used to affect the bioavailability of a cognate ligand of a marker protein. Inhibition of ligand/receptor interaction can be useful therapeutically, both for treating proliferative and differentiative disorders and for modulating (e.g. promoting or inhibiting) cell survival. Moreover, the immunoglobulin fusion proteins of the invention can be used as immunogens to produce antibodies directed against a marker protein in a subject, to purify ligands and in screening assays to identify molecules which inhibit the interaction of the marker protein with ligands.

[0190] Chimeric and fusion proteins of the invention can be produced by standard recombinant DNA techniques. In another embodiment, the fusion gene can be synthesized by conventional techniques including automated DNA synthesizers. Alternatively, PCR amplification of gene fragments can be carried out using anchor primers which give rise to complementary overhangs between two consecutive gene fragments which can subsequently be annealed and re-amplified to generate a chimeric gene sequence (see, e.g., Ausubel et al., supra). Moreover, many expression vectors are commercially available that already encode a fusion moiety (e.g., a GST polypeptide). A nucleic acid encoding a polypeptide of the invention can be cloned into such an expression vector such that the fusion moiety is linked in-frame to the polypeptide of the invention.

[0191] A signal sequence can be used to facilitate secretion and isolation of marker proteins. Signal sequences are typically characterized by a core of hydrophobic amino acids which are generally cleaved from the mature protein during secretion in one or more cleavage events. Such signal peptides contain processing sites that allow cleavage of the signal sequence from the mature proteins as they pass through the secretory pathway. Thus, the invention pertains to marker proteins, fusion proteins or segments thereof having a signal sequence, as well as to such proteins from which the signal sequence has been proteolytically cleaved (i.e., the cleavage products). In one embodiment, a nucleic acid sequence encoding a signal sequence can be operably linked in an expression vector to a protein of interest, such as a marker protein or a segment thereof. The signal sequence directs secretion of the protein, such as from a eukaryotic host into which the expression vector is transformed, and the signal sequence is subsequently or concurrently cleaved. The protein can then be readily purified from the extracellular medium by art recognized methods. Alternatively, the signal sequence can be linked to the protein of interest using a sequence which facilitates purification, such as with a GST domain.

[0192] The present invention also pertains to variants of the marker proteins. Such variants have an altered amino acid sequence which can function as either agonists (mimetics) or as antagonists. Variants can be generated by mutagenesis, e.g., discrete point mutation or truncation. An agonist can retain substantially the same, or a subset, of the biological activities of the naturally occurring form of the protein. An antagonist of a protein can inhibit one or more of the activities of the naturally occurring form of the protein by, for example, competitively binding to a downstream or upstream member of a cellular signaling cascade which includes the protein of interest. Thus, specific biological effects can be elicited by treatment with a variant of limited function. Treatment of a subject with a variant having a subset of the biological activities of the naturally occurring form of the protein can have fewer side effects in a subject relative to treatment with the naturally occurring form of the protein.

[0193] Variants of a marker protein which function as either agonists (mimetics) or as antagonists can be identified by screening combinatorial libraries of mutants, e.g., truncation mutants, of the protein of the invention for agonist or antagonist activity. In one embodiment, a variegated library of variants is generated by combinatorial mutagenesis at the nucleic acid level and is encoded by a variegated gene library. A variegated library of variants can be produced by, for example, enzymatically ligating a mixture of synthetic oligonucleotides into gene sequences such that a degenerate set of potential protein sequences is expressible as individual polypeptides, or alternatively, as a set of larger fusion proteins (e.g., for phage display). There are a variety of methods which can be used to produce libraries of potential variants of the marker proteins from a degenerate oligonucleotide sequence. Methods for synthesizing degenerate oligonucleotides are known in the art (see, e.g., Narang, 1983, Tetrahedron 39:3; Itakura et al., 1984, Annu. Rev. Biochem. 53:323; Itakura et al, 1984, Science 198:1056; Ike et al., 1983 Nucleic Acid Res. 11:477).

[0194] In addition, libraries of segments of a marker protein can be used to generate a variegated population of polypeptides for screening and subsequent selection of variant marker proteins or segments thereof. For example, a library of coding sequence fragments can be generated by treating a double stranded PCR fragment of the coding sequence of interest with a nuclease under conditions wherein nicking occurs only about once per molecule, denaturing the double stranded DNA, renaturing the DNA to form double stranded DNA which can include sense/antisense pairs from different nicked products, removing single stranded portions from reformed duplexes by treatment with S1 nuclease, and ligating the resulting fragment library into an expression vector. By this method, an expression library can be derived which encodes amino terminal and internal fragments of various sizes of the protein of interest.

[0195] Several techniques are known in the art for screening gene products of combinatorial libraries made by point mutations or truncation, and for screening cDNA libraries for gene products having a selected property. The most widely used techniques, which are amenable to high through-put analysis, for screening large gene libraries typically include cloning the gene library into replicable expression vectors, transforming appropriate cells with the resulting library of vectors, and expressing the combinatorial genes under conditions in which detection of a desired activity facilitates isolation of the vector encoding the gene whose product was detected. Recursive ensemble mutagenesis (REM), a technique which enhances the frequency of functional mutants in the libraries, can be used in combination with the screening assays to identify variants of a protein of the invention (Arkin and Yourvan, 1992, Proc. Natl. Acad. Sci. USA 89:7811-7815; Delgrave et al., 1993, Protein Engineering 6(3):327-331).

[0196] Another aspect of the invention pertains to antibodies directed against a protein of the invention. In preferred embodiments, the antibodies specifically bind a marker protein or a fragment thereof. The terms “antibody” and “antibodies” as used interchangeably herein refer to immunoglobulin molecules as well as fragments and derivatives thereof that comprise an immunologically active portion of an immunoglobulin molecule, (i.e., such a portion contains an antigen binding site which specifically binds an antigen, such as a marker protein, e.g., an epitope of a marker protein). An antibody which specifically binds to a protein of the invention is an antibody which binds the protein, but does not substantially bind other molecules in a sample, e.g., a biological sample, which naturally contains the protein. Examples of an immunologically active portion of an immunoglobulin molecule include, but are not limited to, single-chain antibodies (scAb), F(ab) and F(ab′)₂ fragments.

[0197] An isolated protein of the invention or a fragment thereof can be used as an immunogen to generate antibodies. The full-length protein can be used or, alternatively, the invention provides antigenic peptide fragments for use as immunogens. The antigenic peptide of a protein of the invention comprises at least 8 (preferably 10, 15, 20, or 30 or more) amino acid residues of the amino acid sequence of one of the proteins of the invention, and encompasses at least one epitope of the protein such that an antibody raised against the peptide forms a specific immune complex with the protein. Preferred epitopes encompassed by the antigenic peptide are regions that are located on the surface of the protein, e.g., hydrophilic regions. Hydrophobicity sequence analysis, hydrophilicity sequence analysis, or similar analyses can be used to identify hydrophilic regions. In preferred embodiments, an isolated marker protein or fragment thereof is used as an immunogen.

[0198] An immunogen typically is used to prepare antibodies by immunizing a suitable (i.e. immunocompetent) subject such as a rabbit, goat, mouse, or other mammal or vertebrate. An appropriate immunogenic preparation can contain, for example, recombinantly-expressed or chemically-synthesized protein or peptide. The preparation can further include an adjuvant, such as Freund's complete or incomplete adjuvant, or a similar immunostimulatory agent. Preferred immunogen compositions are those that contain no other human proteins such as, for example, immunogen compositions made using a non-human host cell for recombinant expression of a protein of the invention. In such a manner, the resulting antibody compositions have reduced or no binding of human proteins other than a protein of the invention.

[0199] The invention provides polyclonal and monoclonal antibodies. The term “monoclonal antibody” or “monoclonal antibody composition”, as used herein, refers to a population of antibody molecules that contain only one species of an antigen binding site capable of immunoreacting with a particular epitope. Preferred polyclonal and monoclonal antibody compositions are ones that have been selected for antibodies directed against a protein of the invention. Particularly preferred polyclonal and monoclonal antibody preparations are ones that contain only antibodies directed against a marker protein or fragment thereof.

[0200] Polyclonal antibodies can be prepared by immunizing a suitable subject with a protein of the invention as an immunogen The antibody titer in the immunized subject can be monitored over time by standard techniques, such as with an enzyme linked immunosorbent assay (ELISA) using immobilized polypeptide. At an appropriate time after immunization, e.g., when the specific antibody titers are highest, antibody-producing cells can be obtained from the subject and used to prepare monoclonal antibodies (mAb) by standard techniques, such as the hybridoma technique originally described by Kohler and Milstein (1975) Nature 256:495-497, the human B cell hybridoma technique (see Kozbor et al., 1983, Immunol. Today 4:72), the EBV-hybridoma technique (see Cole et al., pp. 77-96 In Monoclonal Antibodies and Cancer Therapy, Alan R. Liss, Inc., 1985) or trioma techniques. The technology for producing hybridomas is well known (see generally Current Protocols in Immunology, Coligan et al. ed., John Wiley & Sons, New York, 1994). Hybridoma cells producing a monoclonal antibody of the invention are detected by screening the hybridoma culture supernatants for antibodies that bind the polypeptide of interest, e.g., using a standard ELISA assay.

[0201] Alternative to preparing monoclonal antibody-secreting hybridomas, a monoclonal antibody directed against a protein of the invention can be identified and isolated by screening a recombinant combinatorial immunoglobulin library (e.g., an antibody phage display library) with the polypeptide of interest. Kits for generating and screening phage display libraries are commercially available (e.g., the Pharmacia Recombinant Phage Antibody System, Catalog No. 27-9400-01; and the Stratagene SurƒZAP Phage Display Kit, Catalog No. 240612). Additionally, examples of methods and reagents particularly amenable for use in generating and screening antibody display library can be found in, for example, U.S. Pat. No. 5,223,409; PCT Publication No. WO 92/18619; PCT Publication No. WO 91/17271; PCT Publication No. WO 92/20791; PCT Publication No. WO 92/15679; PCT Publication No. WO 93/01288; PCT Publication No. WO 92/01047; PCT Publication No. WO 92/09690; PCT Publication No. WO 90/02809; Fuchs et al. (1991) Bio/Technology 9:1370-1372; Hay et al. (1992) Hum. Antibod. Hybridomas 3:81-85; Huse et al. (1989) Science 246:1275-1281; Griffiths et al. (1993) EMBO J. 12:725-734.

[0202] The invention also provides recombinant antibodies that specifically bind a protein of the invention. In preferred embodiments, the recombinant antibodies specifically binds a marker protein or fragment thereof. Recombinant antibodies include, but are not limited to, chimeric and humanized monoclonal antibodies, comprising both human and non-human portions, single-chain antibodies and multi-specific antibodies. A chimeric antibody is a molecule in which different portions are derived from different animal species, such as those having a variable region derived from a murine mAb and a human immunoglobulin constant region. (See, e.g., Cabilly et al., U.S. Pat. No. 4,816,567; and Boss et al., U.S. Pat. No. 4,816,397, which are incorporated herein by reference in their entirety.) Single-chain antibodies have an antigen binding site and consist of single polypeptides. They can be produced by techniques known in the art, for example using methods described in Ladner et. al U.S. Pat. No. 4,946,778 (which is incorporated herein by reference in its entirety); Bird et al., (1988) Science 242:423-426; Whitlow et al., (1991) Methods in Enzymology 2:1-9; Whitlow et al., (1991) Methods in Enzymology 2:97-105; and Huston et al., (1991) Methods in Enzymology Molecular Design and Modeling: Concepts and Applications 203:46-88. Multi-specific antibodies are antibody molecules having at least two antigen-binding sites that specifically bind different antigens. Such molecules can be produced by techniques known in the art, for example using methods described in Segal, U.S. Pat. No. 4,676,980 (the disclosure of which is incorporated herein by reference in its entirety); Holliger et al., (1993) Proc. Natl. Acad. Sci. USA 90:6444-6448; Whitlow et al., (1994) Protein Eng. 7:1017-1026 and U.S. Pat. No. 6,121,424.

[0203] Humanized antibodies are antibody molecules from non-human species having one or more complementarity determining regions (CDRs) from the non-human species and a framework region from a human immunoglobulin molecule. (See, e.g., Queen, U.S. Pat. No. 5,585,089, which is incorporated herein by reference in its entirety.) Humanized monoclonal antibodies can be produced by recombinant DNA techniques known in the art, for example using methods described in PCT Publication No. WO 87/02671; European Patent Application 184,187; European Patent Application 171,496; European Patent Application 173,494; PCT Publication No. WO 86/01533; U.S. Pat. No. 4,816,567; European Patent Application 125,023; Better et al. (1988) Science 240:1041-1043; Liu et al. (1987) Proc. Natl. Acad. Sci. USA 84:3439-3443; Liu et al. (1987) J. Immunol. 139:3521-3526; Sun et al. (1987) Proc. Natl. Acad. Sci. USA 84:214-218; Nishimura et al. (1987) Cancer Res. 47:999-1005; Wood et al. (1985) Nature 314:446-449; and Shaw et al. (1988) J. Natl. Cancer Inst. 80:1553-1559); Morrison (1985) Science 229:1202-1207; Oi et al. (1986) Bio/Techniques 4:214; U.S. Pat. No. 5,225,539; Jones et al. (1986) Nature 321:552-525; Verhoeyan et al. (1988) Science 239:1534; and Beidler et al. (1988) J. Immunol. 141:4053-4060.

[0204] More particularly, humanized antibodies can be produced, for example, using transgenic mice which are incapable of expressing endogenous immunoglobulin heavy and light chains genes, but which can express human heavy and light chain genes. The transgenic mice are immunized in the normal fashion with a selected antigen, e.g., all or a portion of a polypeptide corresponding to a marker of the invention. Monoclonal antibodies directed against the antigen can be obtained using conventional hybridoma technology. The human immunoglobulin transgenes harbored by the transgenic mice rearrange during B cell differentiation, and subsequently undergo class switching and somatic mutation. Thus, using such a technique, it is possible to produce therapeutically useful IgG, IgA and IgE antibodies. For an overview of this technology for producing human antibodies, see Lonberg and Huszar (1995) Int. Rev. Immunol. 13:65-93). For a detailed discussion of this technology for producing human antibodies and human monoclonal antibodies and protocols for producing such antibodies, see, e.g., U.S. Pat. No. 5,625,126; U.S. Pat. No. 5,633,425; U.S. Pat. No. 5,569,825; U.S. Pat. No. 5,661,016; and U.S. Pat. No. 5,545,806. In addition, companies such as Abgenix, Inc. (Freemont, Calif.), can be engaged to provide human antibodies directed against a selected antigen using technology similar to that described above.

[0205] Completely human antibodies which recognize a selected epitope can be generated using a technique referred to as “guided selection.” In this approach a selected non-human monoclonal antibody, e.g., a murine antibody, is used to guide the selection of a completely human antibody recognizing the same epitope (Jespers et al., 1994, Bio/technology 12:899-903).

[0206] The antibodies of the invention can be isolated after production (e.g., from the blood or serum of the subject) or synthesis and further purified by well-known techniques. For example, IgG antibodies can be purified using protein A chromatography. Antibodies specific for a protein of the invention can be selected or (e.g., partially purified) or purified by, e.g., affinity chromatography. For example, a recombinantly expressed and purified (or partially purified) protein of the invention is produced as described herein, and covalently or non-covalently coupled to a solid support such as, for example, a chromatography column. The column can then be used to affinity purify antibodies specific for the proteins of the invention from a sample containing antibodies directed against a large number of different epitopes, thereby generating a substantially purified antibody composition, i.e., one that is substantially free of contaminating antibodies. By a substantially purified antibody composition is meant, in this context, that the antibody sample contains at most only 30% (by dry weight) of contaminating antibodies directed against epitopes other than those of the desired protein of the invention, and preferably at most 20%, yet more preferably at most 10%, and most preferably at most 5% (by dry weight) of the sample is contaminating antibodies. A purified antibody composition means that at least 99% of the antibodies in the composition are directed against the desired protein of the invention.

[0207] In a preferred embodiment, the substantially purified antibodies of the invention may specifically bind to a signal peptide, a secreted sequence, an extracellular domain, a transmembrane or a cytoplasmic domain or cytoplasmic membrane of a protein of the invention. In a particularly preferred embodiment, the substantially purified antibodies of the invention specifically bind to a secreted sequence or an extracellular domain of the amino acid sequences of a protein of the invention. In a more preferred embodiment, the substantially purified antibodies of the invention specifically bind to a secreted sequence or an extracellular domain of the amino acid sequences of a marker protein.

[0208] An antibody directed against a protein of the invention can be used to isolate the protein by standard techniques, such as affinity chromatography or immunoprecipitation. Moreover, such an antibody can be used to detect the marker protein or fragment thereof (e.g., in a cellular lysate or cell supernatant) in order to evaluate the level and pattern of expression of the marker. The antibodies can also be used diagnostically to monitor protein levels in tissues or body fluids (e.g. in an ovary-associated body fluid) as part of a clinical testing procedure, e.g., to, for example, determine the efficacy of a given treatment regimen. Detection can be facilitated by the use of an antibody derivative, which comprises an antibody of the invention coupled to a detectable substance. Examples of detectable substances include various enzymes, prosthetic groups, fluorescent materials, luminescent materials, bioluminescent materials, and radioactive materials. Examples of suitable enzymes include horseradish peroxidase, alkaline phosphatase, β-galactosidase, or acetylcholinesterase; examples of suitable prosthetic group complexes include streptavidin/biotin and avidin/biotin; examples of suitable fluorescent materials include umbelliferone, fluorescein, fluorescein isothiocyanate, rhodamine, dichlorotriazinylamine fluorescein, dansyl chloride or phycoerythrin; an example of a luminescent material includes luminol; examples of bioluminescent materials include luciferase, luciferin, and aequorin, and examples of suitable radioactive material include ¹²⁵I, ¹³¹I, ³⁵S or ³H.

[0209] Antibodies of the invention may also be used as therapeutic agents in treating cancers. In a preferred embodiment, completely human antibodies of the invention are used for therapeutic treatment of human cancer patients, particularly those having an ovarian cancer. In another preferred embodiment, antibodies that bind specifically to a marker protein or fragment thereof are used for therapeutic treatment. Further, such therapeutic antibody may be an antibody derivative or immunotoxin comprising an antibody conjugated to a therapeutic moiety such as a cytotoxin, a therapeutic agent or a radioactive metal ion. A cytotoxin or cytotoxic agent includes any agent that is detrimental to cells. Examples include taxol, cytochalasin B, gramicidin D, ethidium bromide, emetine, mitomycin, etoposide, tenoposide, vincristine, vinblastine, colchicin, doxorubicin, daunorubicin, dihydroxy anthracin dione, mitoxantrone, mithramycin, actinomycin D, 1-dehydrotestosterone, glucocorticoids, procaine, tetracaine, lidocaine, propranolol, and puromycin and analogs or homologs thereof. Therapeutic agents include, but are not limited to, antimetabolites (e.g., methotrexate, 6-mercaptopurine, 6-thioguanine, cytarabine, 5-fluorouracil decarbazine), alkylating agents (e.g., mechlorethamine, thioepa chlorambucil, melphalan, carmustine (BSNU) and lomustine (CCNU), cyclothosphamide, busulfan, dibromomannitol, streptozotocin, mitomycin C, and cis-dichlorodiamine platinum (II) (DDP) cisplatin), anthracyclines (e.g., daunorubicin (formerly daunomycin) and doxorubicin), antibiotics (e.g., dactinomycin (formerly actinomycin), bleomycin, mithramycin, and anthramycin (AMC)), and anti-mitotic agents (e.g., vincristine and vinblastine).

[0210] The conjugated antibodies of the invention can be used for modifying a given biological response, for the drug moiety is not to be construed as limited to classical chemical therapeutic agents. For example, the drug moiety may be a protein or polypeptide possessing a desired biological activity. Such proteins may include, for example, a toxin such as ribosome-inhibiting protein (see Better et al., U.S. Pat. No. 6,146,631, the disclosure of which is incorporated herein in its entirety), abrin, ricin A, pseudomonas exotoxin, or diphtheria toxin; a protein such as tumor necrosis factor, .alpha.-interferon, .beta.-interferon, nerve growth factor, platelet derived growth factor, tissue plasminogen activator; or, biological response modifiers such as, for example, lymphokines, interleukin-1 (“IL-1”), interleukin-2 (“IL-2”), interleukin-6 (“IL-6”), granulocyte macrophase colony stimulating factor (“GM-CSF”), granulocyte colony stimulating factor (“G-CSF”), or other growth factors.

[0211] Techniques for conjugating such therapeutic moiety to antibodies are well known, see, e.g., Arnon et al., “Monoclonal Antibodies For Immunotargeting Of Drugs In Cancer Therapy”, in Monoclonal Antibodies And Cancer Therapy, Reisfeld et al. (eds.), pp. 243-56 (Alan R. Liss, Inc. 1985); Hellstrom et al., “Antibodies For Drug Delivery”, in Controlled Drug Delivery (2nd Ed.), Robinson et al. (eds.), pp. 623-53 (Marcel Dekker, Inc. 1987); Thorpe, “Antibody Carriers Of Cytotoxic Agents In Cancer Therapy: A Review”, in Monoclonal Antibodies '84: Biological And Clinical Applications, Pinchera et al. (eds.), pp. 475-506 (1985); “Analysis, Results, And Future Prospective Of The Therapeutic Use Of Radiolabeled Antibody In Cancer Therapy”, in Monoclonal Antibodies For Cancer Detection And Therapy, Baldwin et al. (eds.), pp. 303-16 (Academic Press 1985), and Thorpe et al., “The Preparation And Cytotoxic Properties Of Antibody-Toxin Conjugates”, Immunol. Rev., 62:119-58 (1982).

[0212] Accordingly, in one aspect, the invention provides substantially purified antibodies, antibody fragments and derivatives, all of which specifically bind to a protein of the invention and preferably, a marker protein. In various embodiments, the substantially purified antibodies of the invention, or fragments or derivatives thereof, can be human, non-human, chimeric and/or humanized antibodies. In another aspect, the invention provides non-human antibodies, antibody fragments and derivatives, all of which specifically bind to a protein of the invention and preferably, a marker protein. Such non-human antibodies can be goat, mouse, sheep, horse, chicken, rabbit, or rat antibodies. Alternatively, the non-human antibodies of the invention can be chimeric and/or humanized antibodies. In addition, the non-human antibodies of the invention can be polyclonal antibodies or monoclonal antibodies. In still a further aspect, the invention provides monoclonal antibodies, antibody fragments and derivatives, all of which specifically bind to a protein of the invention and preferably, a marker protein. The monoclonal antibodies can be human, humanized, chimeric and/or non-human antibodies.

[0213] The invention also provides a kit containing an antibody of the invention conjugated to a detectable substance, and instructions for use. Still another aspect of the invention is a pharmaceutical composition comprising an antibody of the invention and a pharmaceutically acceptable carrier. In preferred embodiments, the pharmaceutical composition contains an antibody of the invention, a therapeutic moiety, and a pharmaceutically acceptable carrier.

[0214] III. Recombinant Expression Vectors and Host Cells

[0215] Another aspect of the invention pertains to vectors, preferably expression vectors, containing a nucleic acid encoding a marker protein (or a portion of such a protein). As used herein, the term “vector” refers to a nucleic acid molecule capable of transporting another nucleic acid to which it has been linked. One type of vector is a “plasmid”, which refers to a circular double stranded DNA loop into which additional DNA segments can be ligated. Another type of vector is a viral vector, wherein additional DNA segments can be ligated into the viral genome. Certain vectors are capable of autonomous replication in a host cell into which they are introduced (e.g., bacterial vectors having a bacterial origin of replication and episomal mammalian vectors). Other vectors (e.g., non-episomal mammalian vectors) are integrated into the genome of a host cell upon introduction into the host cell, and thereby are replicated along with the host genome. Moreover, certain vectors, namely expression vectors, are capable of directing the expression of genes to which they are operably linked. In general, expression vectors of utility in recombinant DNA techniques are often in the form of plasmids (vectors). However, the invention is intended to include such other forms of expression vectors, such as viral vectors (e.g., replication defective retroviruses, adenoviruses and adeno-associated viruses), which serve equivalent functions.

[0216] The recombinant expression vectors of the invention comprise a nucleic acid of the invention in a form suitable for expression of the nucleic acid in a host cell. This means that the recombinant expression vectors include one or more regulatory sequences, selected on the basis of the host cells to be used for expression, which is operably linked to the nucleic acid sequence to be expressed. Within a recombinant expression vector, “operably linked” is intended to mean that the nucleotide sequence of interest is linked to the regulatory sequence(s) in a manner which allows for expression of the nucleotide sequence (e.g., in an in vitro transcription/translation system or in a host cell when the vector is introduced into the host cell). The term “regulatory sequence” is intended to include promoters, enhancers and other expression control elements (e.g., polyadenylation signals). Such regulatory sequences are described, for example, in Goeddel, Methods in Enzymology: Gene Expression Technology vol. 185, Academic Press, San Diego, Calif. (1991). Regulatory sequences include those which direct constitutive expression of a nucleotide sequence in many types of host cell and those which direct expression of the nucleotide sequence only in certain host cells (e.g., tissue-specific regulatory sequences). It will be appreciated by those skilled in the art that the design of the expression vector can depend on such factors as the choice of the host cell to be transformed, the level of expression of protein desired, and the like. The expression vectors of the invention can be introduced into host cells to thereby produce proteins or peptides, including fusion proteins or peptides, encoded by nucleic acids as described herein.

[0217] The recombinant expression vectors of the invention can be designed for expression of a marker protein or a segment thereof in prokaryotic (e.g., E. coli) or eukaryotic cells (e.g., insect cells {using baculovirus expression vectors}, yeast cells or mammalian cells). Suitable host cells are discussed further in Goeddel, supra. Alternatively, the recombinant expression vector can be transcribed and translated in vitro, for example using T7 promoter regulatory sequences and T7 polymerase.

[0218] Expression of proteins in prokaryotes is most often carried out in E. coli with vectors containing constitutive or inducible promoters directing the expression of either fusion or non-fusion proteins. Fusion vectors add a number of amino acids to a protein encoded therein, usually to the amino terminus of the recombinant protein. Such fusion vectors typically serve three purposes: 1) to increase expression of recombinant protein; 2) to increase the solubility of the recombinant protein; and 3) to aid in the purification of the recombinant protein by acting as a ligand in affinity purification. Often, in fusion expression vectors, a proteolytic cleavage site is introduced at the junction of the fusion moiety and the recombinant protein to enable separation of the recombinant protein from the fusion moiety subsequent to purification of the fusion protein. Such enzymes, and their cognate recognition sequences, include Factor Xa, thrombin and enterokinase. Typical fusion expression vectors include pGEX (Pharmacia Biotech Inc; Smith and Johnson, 1988, Gene 67:31-40), pMAL (New England Biolabs, Beverly, Mass.) and pRIT5 (Pharmacia, Piscataway, N.J.) which fuse glutathione S-transferase (GST), maltose E binding protein, or protein A, respectively, to the target recombinant protein.

[0219] Examples of suitable inducible non-fusion E. coli expression vectors include pTrc (Amann et al., 1988, Gene 69:301-315) and pET ld (Studier et al., p. 60-89, In Gene Expression Technology: Methods in Enzymology vol. 185, Academic Press, San Diego, Calif., 1991). Target gene expression from the pTrc vector relies on host RNA polymerase transcription from a hybrid trp-lac fusion promoter. Target gene expression from the pET 11d vector relies on transcription from a T7 gn10-lac fusion promoter mediated by a co-expressed viral RNA polymerase (T7 gn1). This viral polymerase is supplied by host strains BL21(DE3) or HMS174(DE3) from a resident prophage harboring a T7 gn1 gene under the transcriptional control of the lacUV 5 promoter.

[0220] One strategy to maximize recombinant protein expression in E. coli is to express the protein in a host bacteria with an impaired capacity to proteolytically cleave the recombinant protein (Gottesman, p. 119-128, In Gene Expression Technology: Methods in Enzymology vol. 185, Academic Press, San Diego, Calif., 1990. Another strategy is to alter the nucleic acid sequence of the nucleic acid to be inserted into an expression vector so that the individual codons for each amino acid are those preferentially utilized in E. coli (Wada et al., 1992, Nucleic Acids Res. 20:2111-2118). Such alteration of nucleic acid sequences of the invention can be carried out by standard DNA synthesis techniques.

[0221] In another embodiment, the expression vector is a yeast expression vector. Examples of vectors for expression in yeast S. cerevisiae include pYepSec1 (Baldari et al., 1987, EMBO J. 6:229-234), pMFa (Kurjan and Herskowitz, 1982, Cell 30:933-943), pJRY88 (Schultz et al., 1987, Gene 54:113-123), pYES2 (Invitrogen Corporation, San Diego, Calif.), and pPicZ (Invitrogen Corp, San Diego, Calif.).

[0222] Alternatively, the expression vector is a baculovirus expression vector. Baculovirus vectors available for expression of proteins in cultured insect cells (e.g., Sf 9 cells) include the pAc series (Smith et al., 1983, Mol. Cell Biol. 3:2156-2165) and the pVL series (Lucklow and Summers, 1989, Virology 170:31-39).

[0223] In yet another embodiment, a nucleic acid of the invention is expressed in mammalian cells using a mammalian expression vector. Examples of mammalian expression vectors include pCDM8 (Seed, 1987, Nature 329:840) and pMT2PC (Kaufman et al., 1987, EMBO J. 6:187-195). When used in mammalian cells, the expression vector's control functions are often provided by viral regulatory elements. For example, commonly used promoters are derived from polyoma, Adenovirus 2, cytomegalovirus and Simian Virus 40. For other suitable expression systems for both prokaryotic and eukaryotic cells see chapters 16 and 17 of Sambrook et al., supra.

[0224] In another embodiment, the recombinant mammalian expression vector is capable of directing expression of the nucleic acid preferentially in a particular cell type (e.g., tissue-specific regulatory elements are used to express the nucleic acid). Tissue-specific regulatory elements are known in the art. Non-limiting examples of suitable tissue-specific promoters include the albumin promoter (liver-specific; Pinkert et al., 1987, Genes Dev. 1:268-277), lymphoid-specific promoters (Calame and Eaton, 1988, Adv. Immunol. 43:235-275), in particular promoters of T cell receptors (Winoto and Baltimore, 1989, EMBO J. 8:729-733) and immunoglobulins (Banerji et al., 1983, Cell 33:729-740; Queen and Baltimore, 1983, Cell 33:741-748), neuron-specific promoters (e.g., the neurofilament promoter; Byrne and Ruddle, 1989, Proc. Natl. Acad. Sci. USA 86:5473-5477), pancreas-specific promoters (Edlund et al., 1985, Science 230:912-916), and mammary gland-specific promoters (e.g., milk whey promoter; U.S. Pat. No. 4,873,316 and European Application Publication No. 264,166). Developmentally-regulated promoters are also encompassed, for example the murine hox promoters (Kessel and Gruss, 1990, Science 249:374-379) and the α-fetoprotein promoter (Camper and Tilghman, 1989, Genes Dev. 3:537-546).

[0225] The invention further provides a recombinant expression vector comprising a DNA molecule of the invention cloned into the expression vector in an antisense orientation. That is, the DNA molecule is operably linked to a regulatory sequence in a manner which allows for expression (by transcription of the DNA molecule) of an RNA molecule which is antisense to the mRNA encoding a polypeptide of the invention. Regulatory sequences operably linked to a nucleic acid cloned in the antisense orientation can be chosen which direct the continuous expression of the antisense RNA molecule in a variety of cell types, for instance viral promoters and/or enhancers, or regulatory sequences can be chosen which direct constitutive, tissue-specific or cell type specific expression of antisense RNA. The antisense expression vector can be in the form of a recombinant plasmid, phagemid, or attenuated virus in which antisense nucleic acids are produced under the control of a high efficiency regulatory region, the activity of which can be determined by the cell type into which the vector is introduced. For a discussion of the regulation of gene expression using antisense genes see Weintraub et al., 1986, Trends in Genetics, Vol. 1(1).

[0226] Another aspect of the invention pertains to host cells into which a recombinant expression vector of the invention has been introduced. The terms “host cell” and “recombinant host cell” are used interchangeably herein. It is understood that such terms refer not only to the particular subject cell but to the progeny or potential progeny of such a cell. Because certain modifications may occur in succeeding generations due to either mutation or environmental influences, such progeny may not, in fact, be identical to the parent cell, but are still included within the scope of the term as used herein.

[0227] A host cell can be any prokaryotic (e.g., E. coli) or eukaryotic cell (e.g., insect cells, yeast or mammalian cells).

[0228] Vector DNA can be introduced into prokaryotic or eukaryotic cells via conventional transformation or transfection techniques. As used herein, the terms “transformation” and “transfection” are intended to refer to a variety of art-recognized techniques for introducing foreign nucleic acid into a host cell, including calcium phosphate or calcium chloride co-precipitation, DEAE-dextran-mediated transfection, lipofection, or electroporation. Suitable methods for transforming or transfecting host cells can be found in Sambrook, et al. (supra), and other laboratory manuals.

[0229] For stable transfection of mammalian cells, it is known that, depending upon the expression vector and transfection technique used, only a small fraction of cells may integrate the foreign DNA into their genome. In order to identify and select these integrants, a gene that encodes a selectable marker (e.g., for resistance to antibiotics) is generally introduced into the host cells along with the gene of interest. Preferred selectable markers include those which confer resistance to drugs, such as G418, hygromycin and methotrexate. Cells stably transfected with the introduced nucleic acid can be identified by drug selection (e.g., cells that have incorporated the selectable marker gene will survive, while the other cells die).

[0230] A host cell of the invention, such as a prokaryotic or eukaryotic host cell in culture, can be used to produce a marker protein or a segment thereof. Accordingly, the invention further provides methods for producing a marker protein or a segment thereof using the host cells of the invention. In one embodiment, the method comprises culturing the host cell of the invention (into which a recombinant expression vector encoding a marker protein or a segment thereof has been introduced) in a suitable medium such that the is produced. In another embodiment, the method further comprises isolating the a marker protein or a segment thereof from the medium or the host cell.

[0231] The host cells of the invention can also be used to produce nonhuman transgenic animals. For example, in one embodiment, a host cell of the invention is a fertilized oocyte or an embryonic stem cell into which a sequences encoding a marker protein or a segment thereof have been introduced. Such host cells can then be used to create non-human transgenic animals in which exogenous sequences encoding a marker protein of the invention have been introduced into their genome or homologous recombinant animals in which endogenous gene(s) encoding a marker protein have been altered. Such animals are useful for studying the function and/or activity of the marker protein and for identifying and/or evaluating modulators of marker protein. As used herein, a “transgenic animal” is a non-human animal, preferably a mammal, more preferably a rodent such as a rat or mouse, in which one or more of the cells of the animal includes a transgene. Other examples of transgenic animals include non-human primates, sheep, dogs, cows, goats, chickens, amphibians, etc. A transgene is exogenous DNA which is integrated into the genome of a cell from which a transgenic animal develops and which remains in the genome of the mature animal, thereby directing the expression of an encoded gene product in one or more cell types or tissues of the transgenic animal. As used herein, an “homologous recombinant animal” is a non-human animal, preferably a mammal, more preferably a mouse, in which an endogenous gene has been altered by homologous recombination between the endogenous gene and an exogenous DNA molecule introduced into a cell of the animal, e.g., an embryonic cell of the animal, prior to development of the animal.

[0232] A transgenic animal of the invention can be created by introducing a nucleic acid encoding a marker protein into the male pronuclei of a fertilized oocyte, e.g., by microinjection, retroviral infection, and allowing the oocyte to develop in a pseudopregnant female foster animal. Intronic sequences and polyadenylation signals can also be included in the transgene to increase the efficiency of expression of the transgene. A tissue-specific regulatory sequence(s) can be operably linked to the transgene to direct expression of the polypeptide of the invention to particular cells. Methods for generating transgenic animals via embryo manipulation and microinjection, particularly animals such as mice, have become conventional in the art and are described, for example, in U.S. Pat. Nos. 4,736,866 and 4,870,009, U.S. Pat. No. 4,873,191 and in Hogan, Manipulating the Mouse Embryo, Cold Spring Harbor Laboratory Press, Cold Spring Harbor, N.Y., 1986. Similar methods are used for production of other transgenic animals. A transgenic founder animal can be identified based upon the presence of the transgene in its genome and/or expression of mRNA encoding the transgene in tissues or cells of the animals. A transgenic founder animal can then be used to breed additional animals carrying the transgene. Moreover, transgenic animals carrying the transgene can further be bred to other transgenic animals carrying other transgenes.

[0233] To create an homologous recombinant animal, a vector is prepared which contains at least a portion of a gene encoding a marker protein into which a deletion, addition or substitution has been introduced to thereby alter, e.g., functionally disrupt, the gene. In a preferred embodiment, the vector is designed such that, upon homologous recombination, the endogenous gene is functionally disrupted (i.e., no longer encodes a functional protein; also referred to as a “knock out” vector). Alternatively, the vector can be designed such that, upon homologous recombination, the endogenous gene is mutated or otherwise altered but still encodes functional protein (e.g., the upstream regulatory region can be altered to thereby alter the expression of the endogenous protein). In the homologous recombination vector, the altered portion of the gene is flanked at its 5′ and 3′ ends by additional nucleic acid of the gene to allow for homologous recombination to occur between the exogenous gene carried by the vector and an endogenous gene in an embryonic stem cell. The additional flanking nucleic acid sequences are of sufficient length for successful homologous recombination with the endogenous gene. Typically, several kilobases of flanking DNA (both at the 5′ and 3′ ends) are included in the vector (see, e.g., Thomas and Capecchi, 1987, Cell 51:503 for a description of homologous recombination vectors). The vector is introduced into an embryonic stem cell line (e.g., by electroporation) and cells in which the introduced gene has homologously recombined with the endogenous gene are selected (see, e.g., Li et al., 1992, Cell 69:915). The selected cells are then injected into a blastocyst of an animal (e.g., a mouse) to form aggregation chimeras (see, e.g., Bradley, Teratocarcinomas and Embryonic Stem Cells: A Practical Approach, Robertson, Ed., IRL, Oxford, 1987, pp. 113-152). A chimeric embryo can then be implanted into a suitable pseudopregnant female foster animal and the embryo brought to term. Progeny harboring the homologously recombined DNA in their germ cells can be used to breed animals in which all cells of the animal contain the homologously recombined DNA by germline transmission of the transgene. Methods for constructing homologous recombination vectors and homologous recombinant animals are described further in Bradley (1991) Current Opinion in Bio/Technology 2:823-829 and in PCT Publication NOS. WO 90/11354, WO 91/01140, WO 92/0968, and WO 93/04169.

[0234] In another embodiment, transgenic non-human animals can be produced which contain selected systems which allow for regulated expression of the transgene. One example of such a system is the cre/loxP recombinase system of bacteriophage P1. For a description of the cre/loxP recombinase system, see, e.g., Lakso et al. (1992) Proc. Natl. Acad Sci. USA 89:6232-6236. Another example of a recombinase system is the FLP recombinase system of Saccharomyces cerevisiae (O'Gorman et al., 1991, Science 251:1351-1355). If a cre/loxP recombinase system is used to regulate expression of the transgene, animals containing transgenes encoding both the Cre recombinase and a selected protein are required. Such animals can be provided through the construction of “double” transgenic animals, e.g., by mating two transgenic animals, one containing a transgene encoding a selected protein and the other containing a transgene encoding a recombinase.

[0235] Clones of the non-human transgenic animals described herein can also be produced according to the methods described in Wilmut et al. (1997) Nature 385:810-813 and PCT Publication NOS. WO 97/07668 and WO 97/07669.

[0236] IV. Pharmaceutical Compositions

[0237] The nucleic acid molecules, polypeptides, and antibodies (also referred to herein as “active compounds”) of the invention can be incorporated into pharmaceutical compositions suitable for administration. Such compositions typically comprise the nucleic acid molecule, protein, or antibody and a pharmaceutically acceptable carrier. As used herein the language “pharmaceutically acceptable carrier” is intended to include any and all solvents, dispersion media, coatings, antibacterial and antifungal agents, isotonic and absorption delaying agents, and the like, compatible with pharmaceutical administration. The use of such media and agents for pharmaceutically active substances is well known in the art. Except insofar as any conventional media or agent is incompatible with the active compound, use thereof in the compositions is contemplated. Supplementary active compounds can also be incorporated into the compositions.

[0238] The invention includes methods for preparing pharmaceutical compositions for modulating the expression or activity of a marker nucleic acid or protein . Such methods comprise formulating a pharmaceutically acceptable carrier with an agent which modulates expression or activity of a marker nucleic acid or protein. Such compositions can further include additional active agents. Thus, the invention further includes methods for preparing a pharmaceutical composition by formulating a pharmaceutically acceptable carrier with an agent which modulates expression or activity of a marker nucleic acid or protein and one or more additional active compounds.

[0239] The invention also provides methods (also referred to herein as “screening assays”) for identifying modulators, i.e., candidate or test compounds or agents (e.g., peptides, peptidomimetics, peptoids, small molecules or other drugs) which (a) bind to the marker, or (b) have a modulatory (e.g., stimulatory or inhibitory) effect on the activity of the marker or, more specifically, (c) have a modulatory effect on the interactions of the marker with one or more of its natural substrates (e.g., peptide, protein, hormone, co-factor, or nucleic acid), or (d) have a modulatory effect on the expression of the marker. Such assays typically comprise a reaction between the marker and one or more assay components. The other components may be either the test compound itself, or a combination of test compound and a natural binding partner of the marker.

[0240] The test compounds of the present invention may be obtained from any available source, including systematic libraries of natural and/or synthetic compounds. Test compounds may also be obtained by any of the numerous approaches in combinatorial library methods known in the art, including: biological libraries; peptoid libraries (libraries of molecules having the functionalities of peptides, but with a novel, non-peptide backbone which are resistant to enzymatic degradation but which nevertheless remain bioactive; see, e.g., Zuckermann et al., 1994, J. Med. Chem. 37:2678-85); spatially addressable parallel solid phase or solution phase libraries; synthetic library methods requiring deconvolution; the ‘one-bead one-compound’ library method; and synthetic library methods using affinity chromatography selection. The biological library and peptoid library approaches are limited to peptide libraries, while the other four approaches are applicable to peptide, non-peptide oligomer or small molecule libraries of compounds (Lam, 1997, Anticancer Drug Des. 12:145).

[0241] Examples of methods for the synthesis of molecular libraries can be found in the art, for example in: DeWitt et al. (1993) Proc. Natl. Acad. Sci. U.S.A. 90:6909; Erb et al. (1994) Proc. Natl. Acad. Sci. USA 91:11422; Zuckermann et al. (1994). J. Med. Chem. 37:2678; Cho et al. (1993) Science 261:1303; Carrell et al. (1994) Angew. Chem. Int. Ed. Engl. 33:2059; Carell et al. (1994) Angew. Chem. Int. Ed. Engl. 33:2061; and in Gallop et al. (1994) J. Med. Chem. 37:1233.

[0242] Libraries of compounds may be presented in solution (e.g., Houghten, 1992, Biotechniques 13:412-421), or on beads (Lam, 1991, Nature 354:82-84), chips (Fodor, 1993, Nature 364:555-556), bacteria and/or spores, (Ladner, U.S. Pat. No. 5,223,409), plasmids (Cull et al, 1992, Proc Natl Acad Sci USA 89:1865-1869) or on phage (Scott and Smith, 1990, Science 249:386-390; Devlin, 1990, Science 249:404-406; Cwirla et al, 1990, Proc. Natl. Acad Sci. 87:6378-6382; Felici, 1991, J. Mol. Biol. 222:301-310; Ladner, supra.).

[0243] In one embodiment, the invention provides assays for screening candidate or test compounds which are substrates of a protein encoded by or corresponding to a marker or biologically active portion thereof. In another embodiment, the invention provides assays for screening candidate or test compounds which bind to a protein encoded by or corresponding to a marker or biologically active portion thereof. Determining the ability of the test compound to directly bind to a protein can be accomplished, for example, by coupling the compound with a radioisotope or enzymatic label such that binding of the compound to the marker can be determined by detecting the labeled marker compound in a complex. For example, compounds (e.g., marker substrates) can be labeled with ¹²⁵I, ³⁵S, ¹⁴C, or ³H, either directly or indirectly, and the radioisotope detected by direct counting of radioemission or by scintillation counting. Alternatively, assay components can be enzymatically labeled with, for example, horseradish peroxidase, alkaline phosphatase, or luciferase, and the enzymatic label detected by determination of conversion of an appropriate substrate to product.

[0244] In another embodiment, the invention provides assays for screening candidate or test compounds which modulate the expression of a marker or the activity of a protein encoded by or corresponding to a marker, or a biologically active portion thereof. In all likelihood, the protein encoded by or corresponding to the marker can, in vivo, interact with one or more molecules, such as but not limited to, peptides, proteins, hormones, cofactors and nucleic acids. For the purposes of this discussion, such cellular and extracellular molecules are referred to herein as “binding partners” or marker “substrate”.

[0245] One necessary embodiment of the invention in order to facilitate such screening is the use of a protein encoded by or corresponding to marker to identify the protein's natural in vivo binding partners. There are many ways to accomplish this which are known to one skilled in the art. One example is the use of the marker protein as “bait protein” in a two-hybrid assay or three-hybrid assay (see, e.g., U.S. Pat. No. 5,283,317; Zervos et al, 1993, Cell 72:223-232; Madura et al, 1993, J. Biol. Chem. 268:12046-12054; Bartel et al , 1993, Biotechniques 14:920-924; Iwabuchi et al, 1993 Oncogene 8:1693-1696; Brent WO94/10300) in order to identify other proteins which bind to or interact with the marker (binding partners) and, therefore, are possibly involved in the natural function of the marker. Such marker binding partners are also likely to be involved in the propagation of signals by the marker protein or downstream elements of a marker protein-mediated signaling pathway. Alternatively, such marker protein binding partners may also be found to be inhibitors of the marker protein.

[0246] The two-hybrid system is based on the modular nature of most transcription factors, which consist of separable DNA-binding and activation domains. Briefly, the assay utilizes two different DNA constructs. In one construct, the gene that encodes a marker protein fused to a gene encoding the DNA binding domain of a known transcription factor (e.g., GAL-4). In the other construct, a DNA sequence, from a library of DNA sequences, that encodes an unidentified protein (“prey” or “sample”) is fused to a gene that codes for the activation domain of the known transcription factor. If the “bait” and the “prey” proteins are able to interact, in vivo, forming a marker-dependent complex, the DNA-binding and activation domains of the transcription factor are brought into close proximity. This proximity allows transcription of a reporter gene (e.g., LacZ) which is operably linked to a transcriptional regulatory site responsive to the transcription factor. Expression of the reporter gene can be readily detected and cell colonies containing the functional transcription factor can be isolated and used to obtain the cloned gene which encodes the protein which interacts with the marker protein.

[0247] In a further embodiment, assays may be devised through the use of the invention for the purpose of identifying compounds which modulate (e.g., affect either positively or negatively) interactions between a marker protein and its substrates and/or binding partners. Such compounds can include, but are not limited to, molecules such as antibodies, peptides, hormones, oligonucleotides, nucleic acids, and analogs thereof. Such compounds may also be obtained from any available source, including systematic libraries of natural and/or synthetic compounds. The preferred assay components for use in this embodiment is an ovarian cancer marker protein identified herein, the known binding partner and/or substrate of same, and the test compound. Test compounds can be supplied from any source.

[0248] The basic principle of the assay systems used to identify compounds that interfere with the interaction between the marker protein and its binding partner involves preparing a reaction mixture containing the marker protein and its binding partner under conditions and for a time sufficient to allow the two products to interact and bind, thus forming a complex. In order to test an agent for inhibitory activity, the reaction mixture is prepared in the presence and absence of the test compound. The test compound can be initially included in the reaction mixture, or can be added at a time subsequent to the addition of the marker protein and its binding partner. Control reaction mixtures are incubated without the test compound or with a placebo. The formation of any complexes between the marker protein and its binding partner is then detected. The formation of a complex in the control reaction, but less or no such formation in the reaction mixture containing the test compound, indicates that the compound interferes with the interaction of the marker protein and its binding partner. Conversely, the formation of more complex in the presence of compound than in the control reaction indicates that the compound may enhance interaction of the marker protein and its binding partner.

[0249] The assay for compounds that interfere with the interaction of the marker protien with its binding partner may be conducted in a heterogeneous or homogeneous format. Heterogeneous assays involve anchoring either the marker protein or its binding partner onto a solid phase and detecting complexes anchored to the solid phase at the end of the reaction. In homogeneous assays, the entire reaction is carried out in a liquid phase. In either approach, the order of addition of reactants can be varied to obtain different information about the compounds being tested. For example, test compounds that interfere with the interaction between the marker proteins and the binding partners (e.g., by competition) can be identified by conducting the reaction in the presence of the test substance, i e., by adding the test substance to the reaction mixture prior to or simultaneously with the marker and its interactive binding partner. Alternatively, test compounds that disrupt preformed complexes, e.g., compounds with higher binding constants that displace one of the components from the complex, can be tested by adding the test compound to the reaction mixture after complexes have been formed. The various formats are briefly described below.

[0250] In a heterogeneous assay system, either the marker protein or its binding partner is anchored onto a solid surface or matrix, while the other corresponding non-anchored component may be labeled, either directly or indirectly. In practice, microtitre plates are often utilized for this approach. The anchored species can be immobilized by a number of methods, either non-covalent or covalent, that are typically well known to one who practices the art. Non-covalent attachment can often be accomplished simply by coating the solid surface with a solution of the marker protein or its binding partner and drying. Alternatively, an immobilized antibody specific for the assay component to be anchored can be used for this purpose. Such surfaces can often be prepared in advance and stored.

[0251] In related embodiments, a fusion protein can be provided which adds a domain that allows one or both of the assay components to be anchored to a matrix. For example, glutathione-S-transferase/marker fusion proteins or glutathione-S-transferase/binding partner can be adsorbed onto glutathione sepharose beads (Sigma Chemical, St. Louis, Mo.) or glutathione derivatized microtiter plates, which are then combined with the test compound or the test compound and either the non-adsorbed marker or its binding partner, and the mixture incubated under conditions conducive to complex formation (e.g., physiological conditions). Following incubation, the beads or microtiter plate wells are washed to remove any unbound assay components, the immobilized complex assessed either directly or indirectly, for example, as described above. Alternatively, the complexes can be dissociated from the matrix, and the level of marker binding or activity determined using standard techniques.

[0252] Other techniques for immobilizing proteins on matrices can also be used in the screening assays of the invention. For example, either a marker protein or a marker protein binding partner can be immobilized utilizing conjugation of biotin and streptavidin. Biotinylated marker protein or target molecules can be prepared from biotin-NHS (N-hydroxy-succinimide) using techniques known in the art (e.g., biotinylation kit, Pierce Chemicals, Rockford, Ill.), and immobilized in the wells of streptavidin-coated 96 well plates (Pierce Chemical). In certain embodiments, the protein-immobilized surfaces can be prepared in advance and stored.

[0253] In order to conduct the assay, the corresponding partner of the immobilized assay component is exposed to the coated surface with or without the test compound. After the reaction is complete, unreacted assay components are removed (e.g., by washing) and any complexes formed will remain immobilized on the solid surface. The detection of complexes anchored on the solid surface can be accomplished in a number of ways. Where the non-immobilized component is pre-labeled, the detection of label immobilized on the surface indicates that complexes were formed. Where the non-immobilized component is not pre-labeled, an indirect label can be used to detect complexes anchored on the surface; e.g., using a labeled antibody specific for the initially non-immobilized species (the antibody, in turn, can be directly labeled or indirectly labeled with, e.g., a labeled anti-Ig antibody). Depending upon the order of addition of reaction components, test compounds which modulate (inhibit or enhance) complex formation or which disrupt preformed complexes can be detected.

[0254] In an alternate embodiment of the invention, a homogeneous assay may be used. This is typically a reaction, analogous to those mentioned above, which is conducted in a liquid phase in the presence or absence of the test compound. The formed complexes are then separated from unreacted components, and the amount of complex formed is determined. As mentioned for heterogeneous assay systems, the order of addition of reactants to the liquid phase can yield information about which test compounds modulate (inhibit or enhance) complex formation and which disrupt preformed complexes.

[0255] In such a homogeneous assay, the reaction products may be separated from unreacted assay components by any of a number of standard techniques, including but not limited to: differential centrifugation, chromatography, electrophoresis and immunoprecipitation. In differential centrifugation, complexes of molecules may be separated from uncomplexed molecules through a series of centrifugal steps, due to the different sedimentation equilibria of complexes based on their different sizes and densities (see, for example, Rivas, G., and Minton, A. P., Trends Biochem Sci 1993 August; 18(8):284-7). Standard chromatographic techniques may also be utilized to separate complexed molecules from uncomplexed ones. For example, gel filtration chromatography separates molecules based on size, and through the utilization of an appropriate gel filtration resin in a column format, for example, the relatively larger complex may be separated from the relatively smaller uncomplexed components. Similarly, the relatively different charge properties of the complex as compared to the uncomplexed molecules may be exploited to differentially separate the complex from the remaining individual reactants, for example through the use of ion-exchange chromatography resins. Such resins and chromatographic techniques are well known to one skilled in the art (see, e.g., Heegaard, 1998, J. Mol. Recognit. 11:141-148; Hage and Tweed, 1997, J. Chromatogr. B. Biomed. Sci. Appl., 699:499-525). Gel electrophoresis may also be employed to separate complexed molecules from unbound species (see, e.g., Ausubel et al (eds.), as described in: Current Protocols in Molecular Biology, J. Wiley & Sons, New York. 1999). In this technique, protein or nucleic acid complexes are separated based on size or charge, for example. In order to maintain the binding interaction during the electrophoretic process, nondenaturing gels in the absence of reducing agent are typically preferred, but conditions appropriate to the particular interactants will be well known to one skilled in the art. Immunoprecipitation is another common technique utilized for the isolation of a protein-protein complex from solution (see, e.g., Ausubel et al (eds.), In: Current Protocols in Molecular Biology, J. Wiley & Sons, New York. 1999). In this technique, all proteins binding to an antibody specific to one of the binding molecules are precipitated from solution by conjugating the antibody to a polymer bead that may be readily collected by centrifugation. The bound assay components are released from the beads (through a specific proteolysis event or other technique well known in the art which will not disturb the protein-protein interaction in the complex), and a second immunoprecipitation step is performed, this time utilizing antibodies specific for the correspondingly different interacting assay component. In this manner, only formed complexes should remain attached to the beads. Variations in complex formation in both the presence and the absence of a test compound can be compared, thus offering information about the ability of the compound to modulate interactions between the marker protein and its binding partner.

[0256] Also within the scope of the present invention are methods for direct detection of interactions between the marker protein and its natural binding partner and/or a test compound in a homogeneous or heterogeneous assay system without further sample manipulation. For example, the technique of fluorescence energy transfer may be utilized (see, e.g., Lakowicz et al, U.S. Pat. No. 5,631,169; Stavrianopoulos et al, U.S. Pat. No. 4,868,103). Generally, this technique involves the addition of a fluorophore label on a first ‘donor’ molecule (e.g., marker or test compound) such that its emitted fluorescent energy will be absorbed by a fluorescent label on a second, ‘acceptor’ molecule (e.g., marker or test compound), which in turn is able to fluoresce due to the absorbed energy. Alternately, the ‘donor’ protein molecule may simply utilize the natural fluorescent energy of tryptophan residues. Labels are chosen that emit different wavelengths of light, such that the ‘acceptor’ molecule label may be differentiated from that of the ‘donor’. Since the efficiency of energy transfer between the labels is related to the distance separating the molecules, spatial relationships between the molecules can be assessed. In a situation in which binding occurs between the molecules, the fluorescent emission of the ‘acceptor’ molecule label in the assay should be maximal. An FET binding event can be conveniently measured through standard fluorometric detection means well known in the art (e.g., using a fluorimeter). A test substance which either enhances or hinders participation of one of the species in the preformed complex will result in the generation of a signal variant to that of background. In this way, test substances that modulate interactions between a marker and its binding partner can be identified in controlled assays.

[0257] In another embodiment, modulators of marker expression are identified in a method wherein a cell is contacted with a candidate compound and the expression of marker mRNA or protein in the cell, is determined. The level of expression of marker mRNA or protein in the presence of the candidate compound is compared to the level of expression of marker mRNA or protein in the absence of the candidate compound. The candidate compound can then be identified as a modulator of marker expression based on this comparison. For example, when expression of marker mRNA or protein is greater (statistically significantly greater) in the presence of the candidate compound than in its absence, the candidate compound is identified as a stimulator of marker mRNA or protein expression. Conversely, when expression of marker mRNA or protein is less (statistically significantly less) in the presence of the candidate compound than in its absence, the candidate compound is identified as an inhibitor of marker mRNA or protein expression. The level of marker mRNA or protein expression in the cells can be determined by methods described herein for detecting marker mRNA or protein.

[0258] In another aspect, the invention pertains to a combination of two or more of the assays described herein. For example, a modulating agent can be identified using a cell-based or a cell free assay, and the ability of the agent to modulate the activity of a marker protein can be further confirmed in vivo, e.g., in a whole animal model for cellular transformation and/or tumorigenesis.

[0259] This invention further pertains to novel agents identified by the above-described screening assays. Accordingly, it is within the scope of this invention to further use an agent identified as described herein in an appropriate animal model. For example, an agent identified as described herein (e.g., an marker modulating agent, an antisense marker nucleic acid molecule, an marker-specific antibody, or an marker-binding partner) can be used in an animal model to determine the efficacy, toxicity, or side effects of treatment with such an agent. Alternatively, an agent identified as described herein can be used in an animal model to determine the mechanism of action of such an agent. Furthermore, this invention pertains to uses of novel agents identified by the above-described screening assays for treatments as described herein.

[0260] It is understood that appropriate doses of small molecule agents and protein or polypeptide agents depends upon a number of factors within the knowledge of the ordinarily skilled physician, veterinarian, or researcher. The dose(s) of these agents will vary, for example, depending upon the identity, size, and condition of the subject or sample being treated, further depending upon the route by which the composition is to be administered, if applicable, and the effect which the practitioner desires the agent to have upon the nucleic acid or polypeptide of the invention. Exemplary doses of a small molecule include milligram or microgram amounts per kilogram of subject or sample weight (e.g. about 1 microgram per kilogram to about 500 milligrams per kilogram, about 100 micrograms per kilogram to about 5 milligrams per kilogram, or about 1 microgram per kilogram to about 50 micrograms per kilogram). Exemplary doses of a protein or polypeptide include gram, milligram or microgram amounts per kilogram of subject or sample weight (e.g. about 1 microgram per kilogram to about 5 grams per kilogram, about 100 micrograms per kilogram to about 500 milligrams per kilogram, or about 1 milligram per kilogram to about 50 milligrams per kilogram). It is furthermore understood that appropriate doses of one of these agents depend upon the potency of the agent with respect to the expression or activity to be modulated. Such appropriate doses can be determined using the assays described herein. When one or more of these agents is to be administered to an animal (e.g. a human) in order to modulate expression or activity of a polypeptide or nucleic acid of the invention, a physician, veterinarian, or researcher can, for example, prescribe a relatively low dose at first, subsequently increasing the dose until an appropriate response is obtained. In addition, it is understood that the specific dose level for any particular animal subject will depend upon a variety of factors including the activity of the specific agent employed, the age, body weight, general health, gender, and diet of the subject, the time of administration, the route of administration, the rate of excretion, any drug combination, and the degree of expression or activity to be modulated.

[0261] A pharmaceutical composition of the invention is formulated to be compatible with its intended route of administration. Examples of routes of administration include parenteral, e.g., intravenous, intradermal, subcutaneous, oral (e.g., inhalation), transdermal (topical), transmucosal, and rectal administration. Solutions or suspensions used for parenteral, intradermal, or subcutaneous application can include the following components: a sterile diluent such as water for injection, saline solution, fixed oils, polyethylene glycols, glycerine, propylene glycol or other synthetic solvents; antibacterial agents such as benzyl alcohol or methyl parabens; antioxidants such as ascorbic acid or sodium bisulfite; chelating agents such as ethylenediamine-tetraacetic acid; buffers such as acetates, citrates or phosphates and agents for the adjustment of tonicity such as sodium chloride or dextrose. pH can be adjusted with acids or bases, such as hydrochloric acid or sodium hydroxide. The parenteral preparation can be enclosed in ampules, disposable syringes or multiple dose vials made of glass or plastic.

[0262] Pharmaceutical compositions suitable for injectable use include sterile aqueous solutions (where water soluble) or dispersions and sterile powders for the extemporaneous preparation of sterile injectable solutions or dispersions. For intravenous administration, suitable carriers include physiological saline, bacteriostatic water, Cremophor EL (BASF; Parsippany, N.J.) or phosphate buffered saline (PBS). In all cases, the composition must be sterile and should be fluid to the extent that easy syringability exists. It must be stable under the conditions of manufacture and storage and must be preserved against the contaminating action of microorganisms such as bacteria and fungi. The carrier can be a solvent or dispersion medium containing, for example, water, ethanol, polyol (for example, glycerol, propylene glycol, and liquid polyethylene glycol, and the like), and suitable mixtures thereof. The proper fluidity can be maintained, for example, by the use of a coating such as lecithin, by the maintenance of the required particle size in the case of dispersion and by the use of surfactants. Prevention of the action of microorganisms can be achieved by various antibacterial and antifungal agents, for example, parabens, chlorobutanol, phenol, ascorbic acid, thimerosal, and the like. In many cases, it will be preferable to include isotonic agents, for example, sugars, polyalcohols such as mannitol, sorbitol, or sodium chloride in the composition. Prolonged absorption of the injectable compositions can be brought about by including in the composition an agent which delays absorption, for example, aluminum monostearate and gelatin.

[0263] Sterile injectable solutions can be prepared by incorporating the active compound (e.g., a polypeptide or antibody) in the required amount in an appropriate solvent with one or a combination of ingredients enumerated above, as required, followed by filtered sterilization. Generally, dispersions are prepared by incorporating the active compound into a sterile vehicle which contains a basic dispersion medium, and then incorporating the required other ingredients from those enumerated above. In the case of sterile powders for the preparation of sterile injectable solutions, the preferred methods of preparation are vacuum drying and freeze-drying which yields a powder of the active ingredient plus any additional desired ingredient from a previously sterile-filtered solution thereof.

[0264] Oral compositions generally include an inert diluent or an edible carrier. They can be enclosed in gelatin capsules or compressed into tablets. For the purpose of oral therapeutic administration, the active compound can be incorporated with excipients and used in the form of tablets, troches, or capsules. Oral compositions can also be prepared using a fluid carrier for use as a mouthwash, wherein the compound in the fluid carrier is applied orally and swished and expectorated or swallowed.

[0265] Pharmaceutically compatible binding agents, and/or adjuvant materials can be included as part of the composition. The tablets, pills, capsules, troches, and the like can contain any of the following ingredients, or compounds of a similar nature: a binder such as microcrystalline cellulose, gum tragacanth or gelatin; an excipient such as starch or lactose, a disintegrating agent such as alginic acid, Primogel, or corn starch; a lubricant such as magnesium stearate or Sterotes; a glidant such as colloidal silicon dioxide; a sweetening agent such as sucrose or saccharin; or a flavoring agent such as peppermint, methyl salicylate, or orange flavoring.

[0266] For administration by inhalation, the compounds are delivered in the form of an aerosol spray from a pressurized container or dispenser which contains a suitable propellant, e.g., a gas such as carbon dioxide, or a nebulizer.

[0267] Systemic administration can also be by transmucosal or transdermal means. For transmucosal or transdermal administration, penetrants appropriate to the barrier to be permeated are used in the formulation. Such penetrants are generally known in the art, and include, for example, for transmucosal administration, detergents, bile salts, and fusidic acid derivatives. Transmucosal administration can be accomplished through the use of nasal sprays or suppositories. For transdermal administration, the active compounds are formulated into ointments, salves, gels, or creams as generally known in the art.

[0268] The compounds can also be prepared in the form of suppositories (e.g., with conventional suppository bases such as cocoa butter and other glycerides) or retention enemas for rectal delivery.

[0269] In one embodiment, the active compounds are prepared with carriers that will protect the compound against rapid elimination from the body, such as a controlled release formulation, including implants and microencapsulated delivery systems. Biodegradable, biocompatible polymers can be used, such as ethylene vinyl acetate, polyanhydrides, polyglycolic acid, collagen, polyorthoesters, and polylactic acid. Methods for preparation of such formulations will be apparent to those skilled in the art. The materials can also be obtained commercially from Alza Corporation and Nova Pharmaceuticals, Inc. Liposomal suspensions (including liposomes having monoclonal antibodies incorporated therein or thereon) can also be used as pharmaceutically acceptable carriers. These can be prepared according to methods known to those skilled in the art, for example, as described in U.S. Pat. No. 4,522,811.

[0270] It is especially advantageous to formulate oral or parenteral compositions in dosage unit form for ease of administration and uniformity of dosage. Dosage unit form as used herein refers to physically discrete units suited as unitary dosages for the subject to be treated; each unit containing a predetermined quantity of active compound calculated to produce the desired therapeutic effect in association with the required pharmaceutical carrier. The specification for the dosage unit forms of the invention are dictated by and directly dependent on the unique characteristics of the active compound and the particular therapeutic effect to be achieved, and the limitations inherent in the art of compounding such an active compound for the treatment of individuals.

[0271] For antibodies, the preferred dosage is 0.1 mg/kg to 100 mg/kg of body weight (generally 10 mg/kg to 20 mg/kg). If the antibody is to act in the brain, a dosage of 50 mg/kg to 100 mg/kg is usually appropriate. Generally, partially human antibodies and fully human antibodies have a longer half-life within the human body than other antibodies. Accordingly, lower dosages and less frequent administration is often possible. Modifications such as lipidation can be used to stabilize antibodies and to enhance uptake and tissue penetration (e.g., into the ovarian epithelium). A method for lipidation of antibodies is described by Cruikshank et al. (1997) J. Acquired Immune Deficiency Syndromes and Human Retrovirology 14:193.

[0272] The invention also provides vaccine compositions for the prevention and/or treatment of ovarian cancer. The invention provides ovarian cancer vaccine compositions in which a protein of a marker of Table 1, or a combination of proteins of the markers of Table 1, are introduced into a subject in order to stimulate an immune response against the ovarian cancer. The invention also provides ovarian cancer vaccine compositions in which a gene expression construct, which expresses a marker or fragment of a marker identified in Table 1, is introduced into the subject such that a protein or fragment of a protein encoded by a marker of Table 1 is produced by transfected cells in the subject at a higher than normal level and elicits an immune response.

[0273] In one embodiment, an ovarian cancer vaccine is provided and employed as an immunotherapeutic agent for the prevention of ovarian cancer. In another embodiment, an ovarian cancer vaccine is provided and employed as an immunotherapeutic agent for the treatment of ovarian cancer.

[0274] By way of example, an ovarian cancer vaccine comprised of the proteins of the markers of Table 1, may be employed for the prevention and/or treatment of ovarian cancer in a subject by administering the vaccine by a variety of routes, e.g., intradermally, subcutaneously, or intramuscularly. In addition, the ovarian cancer vaccine can be administered together with adjuvants and/or immunomodulators to boost the activity of the vaccine and the subject's response. In one embodiment, devices and/or compositions containing the vaccine, suitable for sustained or intermittent release could be, implanted in the body or topically applied thereto for the relatively slow release of such materials into the body. The ovarian cancer vaccine can be introduced along with immunomodulatory compounds, which can alter the type of immune response produced in order to produce a response which will be more effective in eliminating the cancer.

[0275] In another embodiment, an ovarian cancer vaccine comprised of an expression construct of the markers of Table 1, may be introduced by injection into muscle or by coating onto microprojectiles and using a device designed for the purpose to fire the projectiles at high speed into the skin. The cells of the subject will then express the protein(s) or fragments of proteins of the markers of Table 1 and induce an immune response. In addition, the ovarian cancer vaccine may be introduced along with expression constructs for immunomodulatory molecules, such as cytokines, which may increase the immune response or modulate the type of immune response produced in order to produce a response which will be more effective in eliminating the cancer.

[0276] The marker nucleic acid molecules of the present invention can also be inserted into vectors and used as gene therapy vectors. Gene therapy vectors can be delivered to a subject by, for example, intravenous injection, local administration (U.S. Pat. No. 5,328,470), or by stereotactic injection (see, e.g., Chen et al., 1994, Proc. Natl. Acad. Sci. USA 91:3054-3057). The pharmaceutical preparation of the gene therapy vector can include the gene therapy vector in an acceptable diluent, or can comprise a slow release matrix in which the gene delivery vehicle is imbedded. Alternatively, where the complete gene delivery vector can be produced intact from recombinant cells, e.g. retroviral vectors, the pharmaceutical preparation can include one or more cells which produce the gene delivery system.

[0277] The pharmaceutical compositions can be included in a container, pack, or dispenser together with instructions for administration.

[0278] V. Predictive Medicine

[0279] The present invention pertains to the field of predictive medicine in which diagnostic assays, prognostic assays, pharmacogenomics, and monitoring clinical trails are used for prognostic (predictive) purposes to thereby treat an individual prophylactically. Accordingly, one aspect of the present invention relates to diagnostic assays for determining the level of expression of one or more marker proteins or nucleic acids, in order to determine whether an individual is at risk of developing ovarian cancer. Such assays can be used for prognostic or predictive purposes to thereby prophylactically treat an individual prior to the onset of the cancer.

[0280] Yet another aspect of the invention pertains to monitoring the influence of agents (e.g., drugs or other compounds administered either to inhibit ovarian cancer or to treat or prevent any other disorder {i.e. in order to understand any ovarian carcinogenic effects that such treatment may have} ) on the expression or activity of a marker of the invention in clinical trials. These and other agents are described in further detail in the following sections.

[0281] A. Diagnostic Assays

[0282] An exemplary method for detecting the presence or absence of a marker protein or nucleic acid in a biological sample involves obtaining a biological sample (e.g. an ovary-associated body fluid) from a test subject and contacting the biological sample with a compound or an agent capable of detecting the polypeptide or nucleic acid (e.g., mRNA, genomic DNA, or cDNA). The detection methods of the invention can thus be used to detect mRNA, protein, cDNA, or genomic DNA, for example, in a biological sample in vitro as well as in vivo. For example, in vitro techniques for detection of mRNA include Northern hybridizations and in situ hybridizations. In vitro techniques for detection of a marker protein include enzyme linked immunosorbent assays (ELISAs), Western blots, immunoprecipitations and immunofluorescence. In vitro techniques for detection of genomic DNA include Southern hybridizations. Furthermore, in vivo techniques for detection of a marker protein include introducing into a subject a labeled antibody directed against the protein or fragment thereof. For example, the antibody can be labeled with a radioactive marker whose presence and location in a subject can be detected by standard imaging techniques.

[0283] A general principle of such diagnostic and prognostic assays involves preparing a sample or reaction mixture that may contain a marker, and a probe, under appropriate conditions and for a time sufficient to allow the marker and probe to interact and bind, thus forming a complex that can be removed and/or detected in the reaction mixture. These assays can be conducted in a variety of ways.

[0284] For example, one method to conduct such an assay would involve anchoring the marker or probe onto a solid phase support, also referred to as a substrate, and detecting target marker/probe complexes anchored on the solid phase at the end of the reaction. In one embodiment of such a method, a sample from a subject, which is to be assayed for presence and/or concentration of marker, can be anchored onto a carrier or solid phase support. In another embodiment, the reverse situation is possible, in which the probe can be anchored to a solid phase and a sample from a subject can be allowed to react as an unanchored component of the assay.

[0285] There are many established methods for anchoring assay components to a solid phase. These include, without limitation, marker or probe molecules which are immobilized through conjugation of biotin and streptavidin. Such biotinylated assay components can be prepared from biotin-NHS (N-hydroxy-succinimide) using techniques known in the art (e.g., biotinylation kit, Pierce Chemicals, Rockford, Ill.), and immobilized in the wells of streptavidin-coated 96 well plates (Pierce Chemical). In certain embodiments, the surfaces with immobilized assay components can be prepared in advance and stored.

[0286] Other suitable carriers or solid phase supports for such assays include any material capable of binding the class of molecule to which the marker or probe belongs. Well-known supports or carriers include, but are not limited to, glass, polystyrene, nylon, polypropylene, nylon, polyethylene, dextran, amylases, natural and modified celluloses, polyacrylamides, gabbros, and magnetite.

[0287] In order to conduct assays with the above mentioned approaches, the non-immobilized component is added to the solid phase upon which the second component is anchored. After the reaction is complete, uncomplexed components may be removed (e.g., by washing) under conditions such that any complexes formed will remain immobilized upon the solid phase. The detection of marker/probe complexes anchored to the solid phase can be accomplished in a number of methods outlined herein.

[0288] In a preferred embodiment, the probe, when it is the unanchored assay component, can be labeled for the purpose of detection and readout of the assay, either directly or indirectly, with detectable labels discussed herein and which are well-known to one skilled in the art.

[0289] It is also possible to directly detect marker/probe complex formation without further manipulation or labeling of either component (marker or probe), for example by utilizing the technique of fluorescence energy transfer (see, for example, Lakowicz et al., U.S. Pat. No. 5,631,169; Stavrianopoulos, et al., U.S. Pat. No. 4,868,103). A fluorophore label on the first, ‘donor’ molecule is selected such that, upon excitation with incident light of appropriate wavelength, its emitted fluorescent energy will be absorbed by a fluorescent label on a second ‘acceptor’ molecule, which in turn is able to fluoresce due to the absorbed energy. Alternately, the ‘donor’ protein molecule may simply utilize the natural fluorescent energy of tryptophan residues. Labels are chosen that emit different wavelengths of light, such that the ‘acceptor’ molecule label may be differentiated from that of the ‘donor’. Since the efficiency of energy transfer between the labels is related to the distance separating the molecules, spatial relationships between the molecules can be assessed. In a situation in which binding occurs between the molecules, the fluorescent emission of the ‘acceptor’ molecule label in the assay should be maximal. An FET binding event can be conveniently measured through standard fluorometric detection means well known in the art (e.g., using a fluorimeter).

[0290] In another embodiment, determination of the ability of a probe to recognize a marker can be accomplished without labeling either assay component (probe or marker) by utilizing a technology such as real-time Biomolecular Interaction Analysis (BIA) (see, e.g., Sjolander, S. and Urbaniczky, C., 1991, Anal. Chem. 63:2338-2345 and Szabo et al., 1995, Curr. Opin. Struct. Biol. 5:699-705). As used herein, “BIA” or “surface plasmon resonance” is a technology for studying biospecific interactions in real time, without labeling any of the interactants (e.g., BIAcore). Changes in the mass at the binding surface (indicative of a binding event) result in alterations of the refractive index of light near the surface (the optical phenomenon of surface plasmon resonance (SPR)), resulting in a detectable signal which can be used as an indication of real-time reactions between biological molecules.

[0291] Alternatively, in another embodiment, analogous diagnostic and prognostic assays can be conducted with marker and probe as solutes in a liquid phase. In such an assay, the complexed marker and probe are separated from uncomplexed components by any of a number of standard techniques, including but not limited to: differential centrifugation, chromatography, electrophoresis and immunoprecipitation. In differential centrifugation, marker/probe complexes may be separated from uncomplexed assay components through a series of centrifugal steps, due to the different sedimentation equilibria of complexes based on their different sizes and densities (see, for example, Rivas, G., and Minton, A. P., 1993, Trends Biochem Sci. 18(8):284-7). Standard chromatographic techniques may also be utilized to separate complexed molecules from uncomplexed ones. For example, gel filtration chromatography separates molecules based on size, and through the utilization of an appropriate gel filtration resin in a column format, for example, the relatively larger complex may be separated from the relatively smaller uncomplexed components. Similarly, the relatively different charge properties of the marker/probe complex as compared to the uncomplexed components may be exploited to differentiate the complex from uncomplexed components, for example through the utilization of ion-exchange chromatography resins. Such resins and chromatographic techniques are well known to one skilled in the art (see, e.g., Heegaard, N. H., 1998, J. Mol. Recognit. Winter 11(1-6):141-8; Hage, D. S., and Tweed, S. A. J. Chromatogr B Biomed Sci Appl Oct. 10, 1997; 699(1-2):499-525). Gel electrophoresis may also be employed to separate complexed assay components from unbound components (see, e.g., Ausubel et al., ed., Current Protocols in Molecular Biology, John Wiley & Sons, New York, 1987-1999). In this technique, protein or nucleic acid complexes are separated based on size or charge, for example. In order to maintain the binding interaction during the electrophoretic process, non-denaturing gel matrix materials and conditions in the absence of reducing agent are typically preferred. Appropriate conditions to the particular assay and components thereof will be well known to one skilled in the art.

[0292] In a particular embodiment, the level of marker mRNA can be determined both by in situ and by in vitro formats in a biological sample using methods known in the art. The term “biological sample” is intended to include tissues, cells, biological fluids and isolates thereof, isolated from a subject, as well as tissues, cells and fluids present within a subject. Many expression detection methods use isolated RNA. For in vitro methods, any RNA isolation technique that does not select against the isolation of mRNA can be utilized for the purification of RNA from ovarian cells (see, e.g., Ausubel et al., ed., Current Protocols in Molecular Biology, John Wiley & Sons, New York 1987-1999). Additionally, large numbers of tissue samples can readily be processed using techniques well known to those of skill in the art, such as, for example, the single-step RNA isolation process of Chomczynski (1989, U.S. Pat. No. 4,843,155).

[0293] The isolated mRNA can be used in hybridization or amplification assays that include, but are not limited to, Southern or Northern analyses, polymerase chain reaction analyses and probe arrays. One preferred diagnostic method for the detection of mRNA levels involves contacting the isolated mRNA with a nucleic acid molecule (probe) that can hybridize to the mRNA encoded by the gene being detected. The nucleic acid probe can be, for example, a full-length cDNA, or a portion thereof, such as an oligonucleotide of at least 7, 15, 30, 50, 100, 250 or 500 nucleotides in length and sufficient to specifically hybridize under stringent conditions to a mRNA or genomic DNA encoding a marker of the present invention. Other suitable probes for use in the diagnostic assays of the invention are described herein. Hybridization of an mRNA with the probe indicates that the marker in question is being expressed.

[0294] In one format, the mRNA is immobilized on a solid surface and contacted with a probe, for example by running the isolated mRNA on an agarose gel and transferring the mRNA from the gel to a membrane, such as nitrocellulose. In an alternative format, the probe(s) are immobilized on a solid surface and the mRNA is contacted with the probe(s), for example, in an Affymetrix gene chip array. A skilled artisan can readily adapt known mRNA detection methods for use in detecting the level of mRNA encoded by the markers of the present invention.

[0295] An alternative method for determining the level of mRNA marker in a sample involves the process of nucleic acid amplification, e.g., by rtPCR (the experimental embodiment set forth in Mullis, 1987, U.S. Pat. No. 4,683,202), ligase chain reaction (Barany, 1991, Proc. Natl. Acad. Sci. USA, 88:189-193), self sustained sequence replication (Guatelli et al., 1990, Proc. Natl. Acad. Sci. USA 87:1874-1878), transcriptional amplification system (Kwoh et al., 1989, Proc. Natl. Acad. Sci. USA 86:1173-1177), Q-Beta Replicase (Lizardi et al., 1988, Bio/Technology 6:1197), rolling circle replication (Lizardi et al., U.S. Pat. No. 5,854,033) or any other nucleic acid amplification method, followed by the detection of the amplified molecules using techniques well known to those of skill in the art. These detection schemes are especially useful for the detection of nucleic acid molecules if such molecules are present in very low numbers. As used herein, amplification primers are defined as being a pair of nucleic acid molecules that can anneal to 5′ or 3′ regions of a gene (plus and minus strands, respectively, or vice-versa) and contain a short region in between. In general, amplification primers are from about 10 to 30 nucleotides in length and flank a region from about 50 to 200 nucleotides in length. Under appropriate conditions and with appropriate reagents, such primers permit the amplification of a nucleic acid molecule comprising the nucleotide sequence flanked by the primers.

[0296] For in situ methods, mRNA does not need to be isolated from the ovarian cells prior to detection. In such methods, a cell or tissue sample is prepared/processed using known histological methods. The sample is then immobilized on a support, typically a glass slide, and then contacted with a probe that can hybridize to mRNA that encodes the marker.

[0297] As an alternative to making determinations based on the absolute expression level of the marker, determinations may be based on the normalized expression level of the marker. Expression levels are normalized by correcting the absolute expression level of a marker by comparing its expression to the expression of a gene that is not a marker, e.g., a housekeeping gene that is constitutively expressed. Suitable genes for normalization include housekeeping genes such as the actin gene, or epithelial cell-specific genes. This normalization allows the comparison of the expression level in one sample, e.g., a patient sample, to another sample, e.g., a non-ovarian cancer sample, or between samples from different sources.

[0298] Alternatively, the expression level can be provided as a relative expression level. To determine a relative expression level of a marker, the level of expression of the marker is determined for 10 or more samples of normal versus cancer cell isolates, preferably 50 or more samples, prior to the determination of the expression level for the sample in question. The mean expression level of each of the genes assayed in the larger number of samples is determined and this is used as a baseline expression level for the marker. The expression level of the marker determined for the test sample (absolute level of expression) is then divided by the mean expression value obtained for that marker. This provides a relative expression level.

[0299] Preferably, the samples used in the baseline determination will be from ovarian cancer or from non-ovarian cancer cells of ovarian tissue. The choice of the cell source is dependent on the use of the relative expression level. Using expression found in normal tissues as a mean expression score aids in validating whether the marker assayed is ovarian specific (versus normal cells). In addition, as more data is accumulated, the mean expression value can be revised, providing improved relative expression values based on accumulated data. Expression data from ovarian cells provides a means for grading the severity of the ovarian cancer state.

[0300] In another embodiment of the present invention, a marker protein is detected. A preferred agent for detecting marker protein of the invention is an antibody capable of binding to such a protein or a fragment thereof, preferably an antibody with a detectable label. Antibodies can be polyclonal, or more preferably, monoclonal. An intact antibody, or a fragment or derivatives thereof (e.g., Fab or F(ab′)₂) can be used. The term “labeled”, with regard to the probe or antibody, is intended to encompass direct labeling of the probe or antibody by coupling (i.e., physically linking) a detectable substance to the probe or antibody, as well as indirect labeling of the probe or antibody by reactivity with another reagent that is directly labeled. Examples of indirect labeling include detection of a primary antibody using a fluorescently labeled secondary antibody and end-labeling of a DNA probe with biotin such that it can be detected with fluorescently labeled streptavidin.

[0301] Proteins from ovarian cells can be isolated using techniques that are well known to those of skill in the art. The protein isolation methods employed can, for example, be such as those described in Harlow and Lane (Harlow and Lane, 1988, Antibodies: A Laboratory Manual, Cold Spring Harbor Laboratory Press, Cold Spring Harbor, N.Y.).

[0302] A variety of formats can be employed to determine whether a sample contains a protein that binds to a given antibody. Examples of such formats include, but are not limited to, enzyme immunoassay (EIA), radioimmunoassay (RIA), Western blot analysis and enzyme linked immunoabsorbant assay (ELISA). A skilled artisan can readily adapt known protein/antibody detection methods for use in determining whether ovarian cells express a marker of the present invention.

[0303] In one format, antibodies, or antibody fragments or derivatives, can be used in methods such as Western blots or immunofluorescence techniques to detect the expressed proteins. In such uses, it is generally preferable to immobilize either the antibody or proteins on a solid support. Suitable solid phase supports or carriers include any support capable of binding an antigen or an antibody. Well-known supports or carriers include glass, polystyrene, polypropylene, polyethylene, dextran, nylon, amylases, natural and modified celluloses, polyacrylamides, gabbros, and magnetite.

[0304] One skilled in the art will know many other suitable carriers for binding antibody or antigen, and will be able to adapt such support for use with the present invention. For example, protein isolated from ovarian cells can be run on a polyacrylamide gel electrophoresis and immobilized onto a solid phase support such as nitrocellulose. The support can then be washed with suitable buffers followed by treatment with the detectably labeled antibody. The solid phase support can then be washed with the buffer a second time to remove unbound antibody. The amount of bound label on the solid support can then be detected by conventional means.

[0305] The invention also encompasses kits for detecting the presence of a marker protein or nucleic acid in a biological sample (e.g. an ovary-associated body fluid such as a urine sample). Such kits can be used to determine if a subject is suffering from or is at increased risk of developing ovarian cancer. For example, the kit can comprise a labeled compound or agent capable of detecting a marker protein or nucleic acid in a biological sample and means for determining the amount of the protein or mRNA in the sample (e.g., an antibody which binds the protein or a fragment thereof, or an oligonucleotide probe which binds to DNA or mRNA encoding the protein). Kits can also include instructions for interpreting the results obtained using the kit.

[0306] For antibody-based kits, the kit can comprise, for example: (1) a first antibody (e.g., attached to a solid support) which binds to a marker protein; and, optionally, (2) a second, different antibody which binds to either the protein or the first antibody and is conjugated to a detectable label.

[0307] For oligonucleotide-based kits, the kit can comprise, for example: (1) an oligonucleotide, e.g., a detectably labeled oligonucleotide, which hybridizes to a nucleic acid sequence encoding a marker protein or (2) a pair of primers useful for amplifying a marker nucleic acid molecule. The kit can also comprise, e.g., a buffering agent, a preservative, or a protein stabilizing agent. The kit can further comprise components necessary for detecting the detectable label (e.g., an enzyme or a substrate). The kit can also contain a control sample or a series of control samples which can be assayed and compared to the test sample. Each component of the kit can be enclosed within an individual container and all of the various containers can be within a single package, along with instructions for interpreting the results of the assays performed using the kit.

[0308] B. Pharmacogenomics

[0309] Agents or modulators which have a stimulatory or inhibitory effect on expression of a marker of the invention can be administered to individuals to treat (prophylactically or therapeutically) ovarian cancer in the patient. In conjunction with such treatment, the pharmacogenomics (i.e., the study of the relationship between an individual's genotype and that individual's response to a foreign compound or drug) of the individual may be considered. Differences in metabolism of therapeutics can lead to severe toxicity or therapeutic failure by altering the relation between dose and blood concentration of the pharmacologically active drug. Thus, the pharmacogenomics of the individual permits the selection of effective agents (e.g., drugs) for prophylactic or therapeutic treatments based on a consideration of the individual's genotype. Such pharmacogenomics can further be used to determine appropriate dosages and therapeutic regimens. Accordingly, the level of expression of a marker of the invention in an individual can be determined to thereby select appropriate agent(s) for therapeutic or prophylactic treatment of the individual.

[0310] Pharmacogenomics deals with clinically significant variations in the response to drugs due to altered drug disposition and abnormal action in affected persons. See, e.g., Linder (1997) Clin. Chem. 43(2):254-266. In general, two types of pharmacogenetic conditions can be differentiated. Genetic conditions transmitted as a single factor altering the way drugs act on the body are referred to as “altered drug action.” Genetic conditions transmitted as single factors altering the way the body acts on drugs are referred to as “altered drug metabolism”. These pharmacogenetic conditions can occur either as rare defects or as polymorphisms. For example, glucose-6-phosphate dehydrogenase (G6PD) deficiency is a common inherited enzymopathy in which the main clinical complication is hemolysis after ingestion of oxidant drugs (anti-malarials, sulfonamides, analgesics, nitrofurans) and consumption of fava beans.

[0311] As an illustrative embodiment, the activity of drug metabolizing enzymes is a major determinant of both the intensity and duration of drug action. The discovery of genetic polymorphisms of drug metabolizing enzymes (e.g., N-acetyltransferase 2 (NAT 2) and cytochrome P450 enzymes CYP2D6 and CYP2C19) has provided an explanation as to why some patients do not obtain the expected drug effects or show exaggerated drug response and serious toxicity after taking the standard and safe dose of a drug. These polymorphisms are expressed in two phenotypes in the population, the extensive metabolizer (EM) and poor metabolizer (PM). The prevalence of PM is different among different populations. For example, the gene coding for CYP2D6 is highly polymorphic and several mutations have been identified in PM, which all lead to the absence of functional CYP2D6. Poor metabolizers of CYP2D6 and CYP2C19 quite frequently experience exaggerated drug response and side effects when they receive standard doses. If a metabolite is the active therapeutic moiety, a PM will show no therapeutic response, as demonstrated for the analgesic effect of codeine mediated by its CYP2D6-formed metabolite morphine. The other extreme are the so called ultra-rapid metabolizers who do not respond to standard doses. Recently, the molecular basis of ultra-rapid metabolism has been identified to be due to CYP2D6 gene amplification.

[0312] Thus, the level of expression of a marker of the invention in an individual can be determined to thereby select appropriate agent(s) for therapeutic or prophylactic treatment of the individual. In addition, pharmacogenetic studies can be used to apply genotyping of polymorphic alleles encoding drug-metabolizing enzymes to the identification of an individual's drug responsiveness phenotype. This knowledge, when applied to dosing or drug selection, can avoid adverse reactions or therapeutic failure and thus enhance therapeutic or prophylactic efficiency when treating a subject with a modulator of expression of a marker of the invention.

[0313] C. Monitoring Clinical Trials

[0314] Monitoring the influence of agents (e.g. drug compounds) on the level of expression of a marker of the invention can be applied not only in basic drug screening, but also in clinical trials. For example, the effectiveness of an agent to affect marker expression can be monitored in clinical trials of subjects receiving treatment for ovarian cancer. In a preferred embodiment, the present invention provides a method for monitoring the effectiveness of treatment of a subject with an agent (e.g., an agonist, antagonist, peptidomimetic, protein, peptide, nucleic acid, small molecule, or other drug candidate) comprising the steps of (i) obtaining a pre-administration sample from a subject prior to administration of the agent; (ii) detecting the level of expression of one or more selected markers of the invention in the pre-administration sample; (iii) obtaining one or more post-administration samples from the subject; (iv) detecting the level of expression of the marker(s) in the post-administration samples; (v) comparing the level of expression of the marker(s) in the pre-administration sample with the level of expression of the marker(s) in the post-administration sample or samples; and (vi) altering the administration of the agent to the subject accordingly. For example, increased administration of the agent can be desirable to increase expression of the marker(s) to higher levels than detected, i.e., to increase the effectiveness of the agent. Alternatively, decreased administration of the agent can be desirable to decrease expression of the marker(s) to lower levels than detected, i.e., to decrease the effectiveness of the agent.

[0315] D. Electronic Apparatus Readable Media and Arrays

[0316] Electronic apparatus readable media comprising a marker of the present invention is also provided. As used herein, “electronic apparatus readable media” refers to any suitable medium for storing, holding or containing data or information that can be read and accessed directly by an electronic apparatus. Such media can include, but are not limited to: magnetic storage media, such as floppy discs, hard disc storage medium, and magnetic tape; optical storage media such as compact disc; electronic storage media such as RAM, ROM, EPROM, EEPROM and the like; general hard disks and hybrids of these categories such as magnetic/optical storage media. The medium is adapted or configured for having recorded thereon a marker of the present invention.

[0317] As used herein, the term “electronic apparatus” is intended to include any suitable computing or processing apparatus or other device configured or adapted for storing data or information. Examples of electronic apparatus suitable for use with the present invention include stand-alone computing apparatus; networks, including a local area network (LAN), a wide area network (WAN) Internet, Intranet, and Extranet; electronic appliances such as a personal digital assistants (PDAs), cellular phone, pager and the like; and local and distributed processing systems.

[0318] As used herein, “recorded” refers to a process for storing or encoding information on the electronic apparatus readable medium. Those skilled in the art can readily adopt any of the presently known methods for recording information on known media to generate manufactures comprising the markers of the present invention.

[0319] A variety of software programs and formats can be used to store the marker information of the present invention on the electronic apparatus readable medium. For example, the marker nucleic acid sequence can be represented in a word processing text file, formatted in commercially-available software such as WordPerfect and MicroSoft Word, or represented in the form of an ASCII file, stored in a database application, such as DB2, Sybase, Oracle, or the like, as well as in other forms. Any number of data processor structuring formats (e.g., text file or database) may be employed in order to obtain or create a medium having recorded thereon the the markers of the present invention.

[0320] By providing the markers of the invention in readable form, one can routinely access the marker sequence information for a variety of purposes. For example, one skilled in the art can use the nucleotide or amino acid sequences of the present invention in readable form to compare a target sequence or target structural motif with the sequence information stored within the data storage means. Search means are used to identify fragments or regions of the sequences of the invention which match a particular target sequence or target motif.

[0321] The present invention therefore provides a medium for holding instructions for performing a method for determining whether a subject has ovarian cancer or a pre-disposition to ovarian cancer, wherein the method comprises the steps of determining the presence or absence of a marker and based on the presence or absence of the marker, determining whether the subject has ovarian cancer or a pre-disposition to ovarian cancer and/or recommending a particular treatment for ovarian cancer or pre-ovarian cancer condition.

[0322] The present invention further provides in an electronic system and/or in a network, a method for determining whether a subject has ovarian cancer or a pre-disposition to ovarian cancer associated with a marker wherein the method comprises the steps of determining the presence or absence of the marker, and based on the presence or absence of the marker, determining whether the subject has ovarian cancer or a pre-disposition to ovarian cancer, and/or recommending a particular treatment for the ovarian cancer or pre-ovarian cancer condition. The method may further comprise the step of receiving phenotypic information associated with the subject and/or acquiring from a network phenotypic information associated with the subject.

[0323] The present invention also provides in a network, a method for determining whether a subject has ovarian cancer or a pre-disposition to ovarian cancer associated with a marker, said method comprising the steps of receiving information associated with the marker receiving phenotypic information associated with the subject, acquiring information from the network corresponding to the marker and/or ovarian cancer, and based on one or more of the phenotypic information, the marker, and the acquired information, determining whether the subject has a ovarian cancer or a pre-disposition to ovarian cancer. The method may further comprise the step of recommending a particular treatment for the ovarian cancer or pre-ovarian cancer condition.

[0324] The present invention also provides a business method for determining whether a subject has ovarian cancer or a pre-disposition to ovarian cancer, said method comprising the steps of receiving information associated with the marker, receiving phenotypic information associated with the subject, acquiring information from the network corresponding to the marker and/or ovarian cancer, and based on one or more of the phenotypic information, the marker, and the acquired information, determining whether the subject has ovarian cancer or a pre-disposition to ovarian cancer. The method may further comprise the step of recommending a particular treatment for the ovarian cancer or pre-ovarian cancer condition.

[0325] The invention also includes an array comprising a marker of the present invention. The array can be used to assay expression of one or more genes in the array. In one embodiment, the array can be used to assay gene expression in a tissue to ascertain tissue specificity of genes in the array. In this manner, up to about 7600 genes can be simultaneously assayed for expression. This allows a profile to be developed showing a battery of genes specifically expressed in one or more tissues.

[0326] In addition to such qualitative determination, the invention allows the quantitation of gene expression. Thus, not only tissue specificity, but also the level of expression of a battery of genes in the tissue is ascertainable. Thus, genes can be grouped on the basis of their tissue expression per se and level of expression in that tissue. This is useful, for example, in ascertaining the relationship of gene expression between or among tissues. Thus, one tissue can be perturbed and the effect on gene expression in a second tissue can be determined. In this context, the effect of one cell type on another cell type in response to a biological stimulus can be determined. Such a determination is useful, for example, to know the effect of cell-cell interaction at the level of gene expression. If an agent is administered therapeutically to treat one cell type but has an undesirable effect on another cell type, the invention provides an assay to determine the molecular basis of the undesirable effect and thus provides the opportunity to co-administer a counteracting agent or otherwise treat the undesired effect. Similarly, even within a single cell type, undesirable biological effects can be determined at the molecular level. Thus, the effects of an agent on expression of other than the target gene can be ascertained and counteracted.

[0327] In another embodiment, the array can be used to monitor the time course of expression of one or more genes in the array. This can occur in various biological contexts, as disclosed herein, for example development of ovarian cancer, progression of ovarian cancer, and processes, such a cellular transformation associated with ovarian cancer.

[0328] The array is also useful for ascertaining the effect of the expression of a gene on the expression of other genes in the same cell or in different cells. This provides, for example, for a selection of alternate molecular targets for therapeutic intervention if the ultimate or downstream target cannot be regulated.

[0329] The array is also useful for ascertaining differential expression patterns of one or more genes in normal and abnormal cells. This provides a battery of genes that could serve as a molecular target for diagnosis or therapeutic intervention.

[0330] E. Surrogate Markers

[0331] The markers of the invention may serve as surrogate markers for one or more disorders or disease states or for conditions leading up to disease states, and in particular, ovarian cancer. As used herein, a “surrogate marker” is an objective biochemical marker which correlates with the absence or presence of a disease or disorder, or with the progression of a disease or disorder (e.g., with the presence or absence of a tumor). The presence or quantity of such markers is independent of the disease. Therefore, these markers may serve to indicate whether a particular course of treatment is effective in lessening a disease state or disorder. Surrogate markers are of particular use when the presence or extent of a disease state or disorder is difficult to assess through standard methodologies (e.g., early stage tumors), or when an assessment of disease progression is desired before a potentially dangerous clinical endpoint is reached (e.g., an assessment of cardiovascular disease may be made using cholesterol levels as a surrogate marker, and an analysis of HIV infection may be made using HIV RNA levels as a surrogate marker, well in advance of the undesirable clinical outcomes of myocardial infarction or fully-developed AIDS). Examples of the use of surrogate markers in the art include: Koomen et al. (2000) J. Mass. Spectrom. 35: 258-264; and James (1994) AIDS Treatment News Archive 209.

[0332] The markers of the invention are also useful as pharmacodynamic markers. As used herein, a “pharmacodynamic marker” is an objective biochemical marker which correlates specifically with drug effects. The presence or quantity of a pharmacodynamic marker is not related to the disease state or disorder for which the drug is being administered; therefore, the presence or quantity of the marker is indicative of the presence or activity of the drug in a subject. For example, a pharmacodynamic marker may be indicative of the concentration of the drug in a biological tissue, in that the marker is either expressed or transcribed or not expressed or transcribed in that tissue in relationship to the level of the drug. In this fashion, the distribution or uptake of the drug may be monitored by the pharmacodynamic marker. Similarly, the presence or quantity of the pharmacodynamic marker may be related to the presence or quantity of the metabolic product of a drug, such that the presence or quantity of the marker is indicative of the relative breakdown rate of the drug in vivo. Pharmacodynamic markers are of particular use in increasing the sensitivity of detection of drug effects, particularly when the drug is administered in low doses. Since even a small amount of a drug may be sufficient to activate multiple rounds of marker transcription or expression, the amplified marker may be in a quantity which is more readily detectable than the drug itself. Also, the marker may be more easily detected due to the nature of the marker itself; for example, using the methods described herein, antibodies may be employed in an immune-based detection system for a protein marker, or marker-specific radiolabeled probes may be used to detect a mRNA marker. Furthermore, the use of a pharmacodynamic marker may offer mechanism-based prediction of risk due to drug treatment beyond the range of possible direct observations. Examples of the use of pharmacodynamic markers in the art include: Matsuda et al. U.S. Pat. No. 6,033,862; Hattis et al (1991) Env. Health Perspect. 90: 229-238; Schentag (1999) Am. J. Health-Syst. Pharm. 56 Suppl. 3: S21-S24; and Nicolau (1999) Am, J. Health-Syst. Pharm. 56 Suppl. 3: S16-S20.

[0333] VI. Experimental Protocol for all OV markers and M352-M360

[0334] A. Identification of markers

[0335] The markers of the present invention were identified by transcriptional profiling using mRNA from 9 normal ovarian epithelia, 11 stage I/II ovarian cancer tumors and 25 stage III/IV tumors. Clones having expression at least two-fold higher in ovarian tumors as compared to their expression in non-ovarian tumor tissues in at least 4 tumor samples were selected to have their protein-encoding transcript sequences determined.

[0336] B. Identification of Markers and Assembly of Their Sequences

[0337] Clones which displayed an increase in expression in ovarian tumor samples over the corresponding average expression of non-tumor samples were used for further study. Briefly, BLAST analysis, against both public and proprietary sequence databases, of EST sequences known to be associated with each clone was performed, either directly or in the context of automatically, high-stringency assembled contiguous sequences. An identification of protein sequence corresponding to the clone was accomplished by obtaining one of the following:

[0338] a) a direct match between the protein sequence and at least one EST sequence in one of its 6 possible translations;

[0339] b) a direct match between the nucleotide sequence for the mRNA corresponding to the protein sequence and at least one EST sequence;

[0340] c) a match between the protein sequence and a contiguous assembly (contig) of the EST sequences with other available EST sequences in the databases in one of its 6 possible translations; or

[0341] d) a match between the nucleotide sequence for the mRNA corresponding to the protein sequence and a contiguous assembly of the EST sequences with other available EST sequences in the databases in one of its 6 possible translations.

[0342] C. Identification of Markers Having Newly-Identified Nucleotide and Amino Acid Sequences.

[0343] The markers of Table 2 include newly-identified amino acid sequences. These sequences were found to be novel based on one of the following criteria:

[0344] a) the protein sequence found within available public databases was incomplete or erroneous, leading to the construction of an additional completed/corrected protein sequence that is not found as such in the public domain;

[0345] b) based on nucleotide evidence, variants of the protein sequence were additionally constructed that are not found as such in the public domain; or

[0346] c) the contig for the EST sequences did not match any known protein, so that a novel protein sequence was derived from an open reading frame of the contig.

[0347] VII. Experimental Protocol for M68, M103, M138, M185, M312, M327-M328, M400, M430-M480, M559, M571-M573, M575-M576, M578-M583, M585-594, and M604-M617

[0348] A. Identification of Markers and Assembly of Their Sequences

[0349] The markers of the present invention were identified by transcription profiling using mRNA from 67 ovarian tumors of various histotypes and stage and 96 non-ovarian tumor tissues including normal ovarian epithelium, benign conditions, other normal tissues, and other abnormal tissues. Clones having expression at least three-fold higher in at least 10% of ovarian tumors, as compared to their expression in non-ovarian tumor tissue, were designated as ovarian cancer specific markers. These cDNA clones were selected to have their protein-encoding transcript sequences determined. Briefly, BLAST analysis, against both public and proprietary sequence databases, of EST sequences known to be associated with each clone was performed, either directly or in the context of automatically, high-stringency assembled contiguous sequences. An identification of protein sequence corresponding to the clone was accomplished by obtaining one of the following:

[0350] a) a direct match between the protein sequence and at least one EST sequence in one of its 6 possible translations;

[0351] b) a direct match between the nucleotide sequence for the mRNA corresponding to the protein sequence and at least one EST sequence;

[0352] c) a match between the protein sequence and a contiguous assembly (contig) of the EST sequences with other available EST sequences in the databases in one of its 6 possible translations; or

[0353] d) a match between the nucleotide sequence for the mRNA corresponding to the protein sequence and a contiguous assembly of the EST sequences with other available EST sequences in the databases in one of its 6 possible translations.

[0354] B. Identification of Markers Having Newly-Identified Amino Acid Sequences.

[0355] The markers of Table 2 include newly-identified amino acid sequences. These sequences were found to be novel based on one of the following criteria:

[0356] a) the protein sequence found within available public databases was incomplete or erroneous, leading to the construction of an additional completed/corrected protein sequence that is not found as such in the public domain;

[0357] b) based on nucleotide evidence, variants of the protein sequence were additionally constructed that are not found as such in the public domain; or

[0358] c) the contig for the EST sequences did not match any known protein, so that a novel protein sequence was derived from an open reading frame of the contig.

[0359] VIII. Gene Expression Analysis

[0360] Total RNA from normal human tissue was obtained from commercial sources. The integrity of the RNA was verified by agarose gel electrophoresis and ethidium bromide staining. Cell lines were purchased from ATCC and grown under the conditions recommended by ATCC. Total RNA from a number of various cell lines was prepared using commercial kits (Qiagen). First strand cDNA was prepared using oligo-dT primer and standard conditions. Each RNA preparation was treated with DNase I (Ambion) at 37° C. for 1 hour.

[0361] Novel gene expression was measured by TaqMan® quantitative PCR (Perkin Elmer Applied Biosystems) in cDNA prepared from the following normal human tissues: heart, kidney, skeletal muscle, pancreas, skin, dorsal root ganglion, breast, ovary, prostate, salivary glands, lung, colon, liver and lymph node. FIG. 1 graphically represents the results of the TaqMan® expression study. The columns labelled A to V depict the expression level observed for OV88 in the following tissues:

[0362] Column A: Heart, normal tissue

[0363] Column B: Heart, CHF tissue

[0364] Column C: Kidney, normal tissue

[0365] Column D: Skeletal muscle, normal tissue

[0366] Column E: Pancreas, normal tissue

[0367] Column F: Skin, normal tissue

[0368] Column G: Dorsal root, normal tissue

[0369] Column H: Breast, normal tissue

[0370] Column I: Breast, tumor tissue

[0371] Column J Ovary, normal tissue

[0372] Column K: Ovary, tumor tissue

[0373] Column L: Prostate, normal tissue

[0374] Column M: Prostate, tumor tissue

[0375] Column N: Salivary glands, normal tissue

[0376] Column O: Lung, normal tissue

[0377] Column P: Lung, tumor tissue

[0378] Column Q: Lu ng, COPD tissue

[0379] Column R: Colon, IBD tissue

[0380] Column S: Liver , normal tissue

[0381] Column T: Liver fibrosis

[0382] Column U: Lymph node, normal tissue

[0383] Column V: Positive control

[0384] IX. Summary of the Data Provided in the Tables

[0385] Tables 1-3 list the markers of the present invention. In the Tables the markers are identified with a name (“Marker”), the name the gene is commonly known by, if applicable (“Gene Name”), the Sequence Listing identifier of the cDNA sequence of a nucleotide transcript encoded by or corresponding to the marker (“SEQ ID NO (nts)”), the Sequence Listing identifier of the amino acid sequence of a protein encoded by the nucleotide transcript (“SEQ ID NO (AAs)”), and the location of the protein coding sequence within the cDNA sequence (“CDS”).

[0386] Table 1 lists all of the markers of the invention, which are over-expressed in ovarian cancer cells compared to normal (i.e., non-cancerous) ovarian cells and comprises markers listed in Tables 2 and 3. Table 2 lists newly-identified nucleotide and amino acid sequences useful as ovarian cancer markers. Table 3 lists newly-identified nucleotide sequences useful as ovarian cancer markers.

### Other Embodiments

[0387] Those skilled in the art will recognize, or be able to ascertain using no more than routine experimentation, many equivalents to the specific embodiments of the invention described herein. Such equivalents are intended to be encompassed by the following claims:

What is claimed:

1. A method of assessing whether a patient is afflicted with ovarian cancer, the method comprising comparing:
a) the level of expression of a marker in a patient sample, wherein the marker is selected from Table 1, and
b) the normal level of expression of the marker in a control non-ovarian cancer sample,
wherein a significant increase in the level of expression of the marker in the patient sample and the normal level is an indication that the patient is afflicted with ovarian cancer.

The application's sequence listing, which the Patent Office published only in electronic form, follows.

SEQUENCE LISTING (363 sequences)

SEQ ID NO: 1 - DNA, 4643 bp, Homo sapiens
cctactctattcagatattctccagattcctaaagattagagatcatttctcattctcctaggagtactcacttcaggaagcaaccagataaaagagaggtgcaacggaagccagaacattcctcctggaaattcaacctgtttcgcagtttctcgaggaatcagcattcagtcaatccgggccgggagcagtcatctgtggtgaggctgattggctgggcaggaacagcgccggggcgtgggctgagcacagcgcttcgctctctttgccacaggaagcctgagctcattcgagtagcggctcttccaagctcaaagaagcagaggccgctgttcgtttcctttaggtctttccactaaagtcggagtatcttcttccaagatttcacgtcttggtggccgttccaaggagcgcgaggtcgggatggatcttgaaggggaccgcaatggaggagcaaagaagaagaacttttttaaactgaacaataaaagtgaaaaagataagaaggaaaagaaaccaactgtcagtgtattttcaatgtttcgctattcaaattggcttgacaagttgtatatggtggtgggaactttggctgccatcatccatggggctggacttcctctcatgatgctggtgtttggagaaatgacagatatctttgcaaatgcaggaaatttagaagatctgatgtcaaacatcactaatagaagtgatatcaatgatacagggttcttcatgaatctggaggaagacatgaccaggtatgcctattattacagtggaattggtgctggggtgctggttgctgcttacattcaggtttcattttggtgcctggcagctggaagacaaatacacaaaattagaaaacagttttttcatgctataatgcgacaggagataggctggtttgatgtgcacgatgttggggagcttaacacccgacttacagatgatgtctccaagattaatgaaggaattggtgacaaaattggaatgttctttcagtcaatggcaacatttttcactgggtttatagtaggatttacacgtggttggaagctaacccttgtgattttggccatcagtcctgttcttggactgtcagctgctgtctgggcaaagatactatcttcatttactgataaagaactcttagcgtatgcaaaagctggagcagtagctgaagaggtcttggcagcaattagaactgtgattgcatttggaggacaaaagaaagaacttgaaaggtacaacaaaaatttagaagaagctaaaagaattgggataaagaaagctattacagccaatatttctataggtgctgctttcctgctgatctatgcatcttatgctctggccttctggtatgggaccaccttggtcctctcaggggaatattctattggacaagtactcactgtattttctgtattaattggggcttttagtgttggacaggcatctccaagcattgaagcatttgcaaatgcaagaggagcagcttatgaaatcttcaagataattgataataagccaagtattgacagctattcgaagagtgggcacaaaccagataatattaagggaaatttggaattcagaaatgttcacttcagttacccatctcgaaaagaagttaagatcttgaagggtctgaacctgaaggtgcagagtgggcagacggtggccctggttggaaacagtggctgtgggaagagcacaacagtccagctgatgcagaggctctatgaccccacagaggggatggtcagtgttgatggacaggatattaggaccataaatgtaaggtttctacgggaaatcattggtgtggtgagtcaggaacctgtattgtttgccaccacgatagctgaaaacattcgctatggccgtgaaaatgtcaccatggatgagattgagaaagctgtcaaggaagccaatgcctatgactttatcatgaaactgcctcataaatttgacaccctggttggagagagaggggcccagttgagtggtgggcagaagcagaggatcgccattgcacgtgccctggttcgcaaccccaagatcctcctgctggatgaggccacgtcagccttggacacagaaagcgaagcagtggttcaggtggctctggataaggccagaaaaggtcggaccaccattgtgatagctcatcgtttgtctacagttcgtaatgctgacgtcatcgctggtttcgatgatggagtcattgtggagaaaggaaatcatgatgaactcatgaaagagaaaggcatttacttcaaacttgtcacaatgcagacagcaggaaatgaagttgaattagaaaatgcagctgatgaatccaaaagtgaaattgatgccttggaaatgtcttcaaatgattcaagatccagtctaataagaaaaagatcaactcgtaggagtgtccgtggatcacaagcccaagacagaaagcttagtaccaaagaggctctggatgaaagtatacctccagtttccttttggaggattatgaagctaaatttaactgaatggccttattttgttgttggtgtattttgtgccattataaatggaggcctgcaaccagcatttgcaataatattttcaaagattataggggtttttacaagaattgatgatcctgaaacaaaacgacagaatagtaacttgttttcactattgtttctagcccttggaattatttcttttattacatttttccttcagggtttcacatttggcaaagctggagagatcctcaccaagcggctccgatacatggttttccgatccatgctcagacaggatgtgagttggtttgatgaccctaaaaacaccactggagcattgactaccaggctcgccaatgatgctgctcaagttaaaggggctataggttccaggcttgctgtaattacccagaatatagcaaatcttgggacaggaataattatatccttcatctatggttggcaactaacactgttactcttagcaattgtacccatcattgcaatagcaggagttgttgaaatgaaaatgttgtctggacaagcactgaaagataagaaagaactagaaggtgctgggaagatcgctactgaagcaatagaaaacttccgaaccgttgtttctttgactcaggagcagaagtttgaacatatgtatgctcagagtttgcaggtaccatacagaaactctttgaggaaagcacacatctttggaattacattttccttcacccaggcaatgatgtatttttcctatgctggatgtttccggtttggagcctacttggtggcacataaactcatgagctttgaggatgttctgttagtattttcagctgttgtctttggtgccatggccgtggggcaagtcagttcatttgctcctgactatgccaaagccaaaatatcagcagcccacatcatcatgatcattgaaaaaacccctttgattgacagctacagcacggaaggcctaatgccgaacacattggaaggaaatgtcacatttggtgaagttgtattcaactatcccacccgaccggacatcccagtgcttcagggactgagcctggaggtgaagaagggccagacgctggctctggtgggcagcagtggctgtgggaagagcacagtggtccagctcctggagcggttctacgaccccttggcagggaaagtgctgcttgatggcaaagaaataaagcgactgaatgttcagtggctccgagcacacctgggcatcgtgtcccaggagcccatcctgtttgactgcagcattgctgagaacattgcctatggagacaacagccgggtggtgtcacaggaagagattgtgagggcagcaaaggaggccaacatacatgccttcatcgagtcactgcctaataaatatagcactaaagtaggagacaaaggaactcagctctctggtggccagaaacaacgcattgccatagctcgtgcccttgttagacagcctcatattttgcttttggatgaagccacgtcagctctggatacagaaagtgaaaaggttgtccaagaagccctggacaaagccagagaaggccgcacctgcattgtgattgctcaccgcctgtccaccatccagaatgcagacttaatagtggtgtttcagaatggcagagtcaaggagcatggcacgcatcagcagctgctggcacagaaaggcatctatttttcaatggtcagtgtccaggctggaacaaagcgccagtgaactctgactgtatgagatgttaaatactttttaatatttgtttagatatgacatttattcaaagttaaaagcaaacacttacagaattatgaagaggtatctgtttaacatttcctcagtcaagttcagagtcttcagagacttcgtaattaaaggaacagagtgagagacatcatcaagtggagagaaatcatagtttaaactgcattataaattttataacagaattaaagtagattttaaaagataaaatgtgtaattttgtttatattttcccatttggactgtaactgactgccttgctaaaagattatagaagtagcaaaaagtattgaaatgtttgcataaagtgtctataataaaactaaactttcatgtg

SEQ ID NO: 2 - protein, 1279 aa, Homo sapiens
MDLEGDRNGGAKKKNFFKLNNKSEKDKKEKKPTVSVFSMFRYSNWLDKLYMVVGTLAAIIHGAGLPLMMLVFGEMTDIFANAGNLEDLMSNITNRSDINDTGFFMNLEEDMTRYAYYYSGIGAGVLVAAYIQVSFWCLAAGRQIHKIRKQFFHAIMRQEIGWFDVHDVGELNTRLTDDVSKINEGIGDKIGMFFQSMATFFTGFIVGFTRGWKLTLVILAISPVLGLSAAVWAKILSSFTDKELLAYAKAGAVAEEVLAAIRTVIAFGGQKKELERYNKNLEEAKRIGIKKAITANISIGAAFLLIYASYALAFWYGTTLVLSGEYSIGQVLTVFSVLIGAFSVGQASPSIEAFANARGAAYEIFKIIDNKPSIDSYSKSGHKPDNIKGNLEFRNVHFSYPSRKEVKILKGLNLKVQSGQTVALVGNSGCGKSTTVQLMQRLYDPTEGMVSVDGQDIRTINVRFLREIIGVVSQEPVLFATTIAENIRYGRENVTMDEIEKAVKEANAYDFIMKLPHKFDTLVGERGAQLSGGQKQRIAIARALVRNPKILLLDEATSALDTESEAVVQVALDKARKGRTTIVIAHRLSTVRNADVIAGFDDGVIVEKGNHDELMKEKGIYFKLVTMQTAGNEVELENAADESKSEIDALEMSSNDSRSSLIRKRSTRRSVRGSQAQDRKLSTKEALDESIPPVSFWRIMKLNLTEWPYFVVGVFCAIINGGLQPAFAIIFSKIIGVFTRIDDPETKRQNSNLFSLLFLALGIISFITFFLQGFTFGKAGEILTKRLRYMVFRSMLRQDVSWFDDPKNTTGALTTRLANDAAQVKGAIGSRLAVITQNIANLGTGIIISFIYGWQLTLLLLAIVPIIAIAGVVEMKMLSGQALKDKKELEGAGKIATEAIENFRTVVSLTQEQKFEHMYAQSLQVPYRNSLRKAHIFGITFSFTQAMMYFSYAGCFRFGAYLVAHKLMSFEDVLLVFSAVVFGAMAVGQVSSFAPDYAKAKISAAHIIMIIEKTPLIDSYSTEGLMPNTLEGNVTFGEVVFNYPTRPDIPVLQGLSLEVKKGQTLALVGSSGCGKSTVVQLLERFYDPLAGKVLLDGKEIKRLNVQWLRAHLGIVSQEPILFDCSIAENIAYGDNSRVVSQEEIVRAAKEANIHAFIESLPNKYSTKVGDKGTQLSGGQKQRIAIARALVRQPHILLLDEATSALDTESEKVVQEALDKAREGRTCIVIAHRLSTIQNADLIVVFQNGRVKEHGTHQQLLAQKGIYFSMVSVQAGTKRQ

SEQ ID NO: 3 - DNA, 3859 bp, Homo sapiens
aatctatcagggaacggcggtggccggtgcggcgtgttcggtgcgctctggccgctcaggccgtgcggctgggtgagcgcacgcgaggcggcgaggcggcaagcgtgtttctaggtcgtggcgtcgggcttccggagctttggcggcagctaggggaggatggcggagtcttcggataagctctatcgagtcgagtacgccaagagcgggcgcgcctcttgcaagaaatgcagcgagagcatccccaaggactcgctccggatggccatcatggtgcagtcgcccatgtttgatggaaaagtcccacactggtaccacttctcctgcttctggaaggtgggccactccatccggcaccctgacgttgaggtggatgggttctctgagcttcggtgggatgaccagcagaaagtcaagaagacagcggaagctggaggagtgacaggcaaaggccaggatggaattggtagcaaggcagagaagactctgggtgactttgcagcagagtatgccaagtccaacagaagtacgtgcaaggggtgtatggagaagatagaaaagggccaggtgcgcctgtccaagaagatggtggacccggagaagccacagctaggcatgattgaccgctggtaccatccaggctgctttgtcaagaacagggaggagctgggtttccggcccgagtacagtgcgagtcagctcaagggcttcagcctccttgctacagaggataaagaagccctgaagaagcagctcccaggagtcaagagtgaaggaaagagaaaaggcgatgaggtggatggagtggatgaagtggcgaagaagaaatctaaaaaagaaaaagacaaggatagtaagcttgaaaaagccctaaaggctcagaacgacctgatctggaacatcaaggacgagctaaagaaagtgtgttcaactaatgacctgaaggagctactcatcttcaacaagcagcaagtgccttctggggagtcggcgatcttggaccgagtagctgatggcatggtgttcggtgccctccttccctgcgaggaatgctcgggtcagctggtcttcaagagcgatgcctattactgcactggggacgtcactgcctggaccaagtgtatggtcaagacacagacacccaaccggaaggagtgggtaaccccaaaggaattccgagaaatctcttacctcaagaaattgaaggttaaaaagcaggaccgtatattccccccagaaaccagcgcctccgtggcggccacgcctccgccctccacagcctcggctcctgctgctgtgaactcctctgcttcagcagataagccattatccaacatgaagatcctgactctcgggaagctgtcccggaacaaggatgaagtgaaggccatgattgagaaactcggggggaagttgacggggacggccaacaaggcttccctgtgcatcagcaccaaaaaggaggtggaaaagatgaataagaagatggaggaagtaaaggaagccaacatccgagttgtgtctgaggacttcctccaggacgtctccgcctccaccaagagccttcaggagttgttcttagcgcacatcttgtccccttggggggcagaggtgaaggcagagcctgttgaagttgtggccccaagagggaagtcaggggctgcgctctccaaaaaaagcaagggccaggtcaaggaggaaggtatcaacaaatctgaaaagagaatgaaattaactcttaaaggaggagcagctgtggatcctgattctggactggaacactctgcgcatgtcctggagaaaggtgggaaggtcttcagtgccacccttggcctggtggacatcgttaaaggaaccaactcctactacaagctgcagcttctggaggacgacaaggaaaacaggtattggatattcaggtcctggggccgtgtgggtacggtgatcggtagcaacaaactggaacagatgccgtccaaggaggatgccattgagcagttcatgaaattatatgaagaaaaaaccgggaacgcttggcactccaaaaatttcacgaagtatcccaaaaagttttaccccctggagattgactatggccaggatgaagaggcagtgaagaagctcacagtaaatcctggcaccaagtccaagctccccaagccagttcaggacctcatcaagatgatctttgatgtggaaagtatgaagaaagccatggtggagtatgagatcgaccttcagaagatgcccttggggaagctgagcaaaaggcagatccaggccgcatactccatcctcagtgaggtccagcaggcggtgtctcagggcagcagcgactctcagatcctggatctctcaaatcgcttttacaccctgatcccccacgactttgggatgaagaagcctccgctcctgaacaatgcagacagtgtgcaggccaaggtggaaatgcttgacaacctgctggacatcgaggtggcctacagtctgctcaggggagggtctgatgatagcagcaaggatcccatcgatgtcaactatgagaagctcaaaactgacattaaggtggttgacagagattctgaagaagccgagatcatcaggaagtatgttaagaacactcatgcaaccacacacagtgcgtatgacttggaagtcatcgatatctttaagatagagcgtgaaggcgaatgccagcgttacaagccctttaagcagcttcataaccgaagattgctgtggcacgggtccaggaccaccaactttgctgggatcctgtcccagggtcttcggatagccccgcctgaagcgcccgtgacaggctacatgtttggtaaagggatctatttcgctgacatggtctccaagagtgccaactactaccatacgtctcagggagacccaataggcttaatcctgttgggagaagttgcccttggaaacatgtatgaactgaagcacgcttcacatatcagcaggttacccaagggcaagcacagtgtcaaaggtttgggcaaaactacccctgatccttcagctaacattagtctggatggtgtagacgttcctcttgggaccgggatttcatctggtgtgatagacacctctctactatataacgagtacattgtctatgatattgctcaggtaaatctgaagtatctgctgaaactgaaattcaattttaagacctccctgtggtaattgggagaggtagccgagtcacacccggtggctgtggtatgaattcacccgaagcgcttctgcaccaactcacctggccgctaagttgctgatgggtagtacctgtactaaaccacctcagaaaggattttacagaaacgtgttaaaggttttctctaacttctcaagtcccttgttttgtgttgtgtctgtggggaggggttgttttggggttgtttttgttttttcttgccaggtagataaaactgacatagagaaaaggctggagagagattctgttgcatagactagtcctatggaaaaaaccaaagcttcgttagaatgtctgccttactggtttccccagggaaggaaaaatacacttccacccttttttctaagtgttcgtctttagttttgattttggaaagatgttaagcatttatttttagttaaaataaaaactaatttcatactatttagattttcttttttatcttgcacttattgtcccctttttagttttttttgtttgcctcttgtggtgaggggtgtgggaagaccaaaggaaggaacgctaacaatttctcatacttagaaacaaaaagagctttccttctccaggaatactgaacatgggagctcttgaaatatgtagtattaaaagttgcatttg

SEQ ID NO: 4 - protein, 1014 aa, Homo sapiens
MAESSDKLYRVEYAKSGRASCKKCSESIPKDSLRMAIMVQSPMFDGKVPHWYHFSCFWKVGHSIRHPDVEVDGFSELRWDDQQKVKKTAEAGGVTGKGQDGIGSKAEKTLGDFAAEYAKSNRSTCKGCMEKIEKGQVRLSKKMVDPEKPQLGMIDRWYHPGCFVKNREELGFRPEYSASQLKGFSLLATEDKEALKKQLPGVKSEGKRKGDEVDGVDEVAKKKSKKEKDKDSKLEKALKAQNDLIWNIKDELKKVCSTNDLKELLIFNKQQVPSGESAILDRVADGMVFGALLPCEECSGQLVFKSDAYYCTGDVTAWTKCMVKTQTPNRKEWVTPKEFREISYLKKLKVKKQDRIFPPETSASVAATPPPSTASAPAAVNSSASADKPLSNMKILTLGKLSRNKDEVKAMIEKLGGKLTGTANKASLCISTKKEVEKMNKKMEEVKEANIRVVSEDFLQDVSASTKSLQELFLAHILSPWGAEVKAEPVEVVAPRGKSGAALSKKSKGQVKEEGINKSEKRMKLTLKGGAAVDPDSGLEHSAHVLEKGGKVFSATLGLVDIVKGTNSYYKLQLLEDDKENRYWIFRSWGRVGTVIGSNKLEQMPSKEDAIEQFMKLYEEKTGNAWHSKNFTKYPKKFYPLEIDYGQDEEAVKKLTVNPGTKSKLPKPVQDLIKMIFDVESMKKAMVEYEIDLQKMPLGKLSKRQIQAAYSILSEVQQAVSQGSSDSQILDLSNRFYTLIPHDFGMKKPPLLNNADSVQAKVEMLDNLLDIEVAYSLLRGGSDDSSKDPIDVNYEKLKTDIKVVDRDSEEAEIIRKYVKNTHATTHSAYDLEVIDIFKIEREGECQRYKPFKQLHNRRLLWHGSRTTNFAGILSQGLRIAPPEAPVTGYMFGKGIYFADMVSKSANYYHTSQGDPIGLILLGEVALGNMYELKHASHISRLPKGKHSVKGLGKTTPDPSANISLDGVDVPLGTGISSGVIDTSLLYNEYIVYDIAQVNLKYLLKLKFNFKTSLW

SEQ ID NO: 5 - DNA, 1465 bp, Homo sapiens
ggcacgagggggacgctctcagctctcggcgcacggcccaggttatcttgtagcatagcaacttcggatttcactctacccggagagtttcccgcttggttgaacacattggcctcaggaagcttccttcaaaatgtctactgttcacgaaatcctgtgcaagctcagcttggagggtgatcactctacacccccaagtgcatatgggtctgtcaaagcctatactaactttgatgctgagcgggatgctttgaacattgaaacagccatcaagaccaaaggtgtggatgaggtcaccattgtcaacattttgaccaaccgcagcaatgcacagagacaggatattgccttcgcctaccagagaaggaccaaaaaggaacttgcatcagcactgaagtcagccttatctggccacctggagacggtgattttgggcctattgaagacacctgctcagtatgacgcttctgagctaaaagcttccatgaaggggctgggaaccgacgaggactctctcattgagatcatctgctccagaaccaaccaggagctgcaggaaattaacagagtctacaaggaaatgtacaagactgatctggagaaggacattatttcggacacatctggtgacttccgcaagctgatggttgccctggcaaagggtagaagagcagaggatggctctgtcattgattatgaactgattgaccaagatgctcgggatctctatgacgctggagtgaagaggaaaggaactgatgttcccaagtggatcagcatcatgaccgagcggagcgtgccccacctccagaaagtatttgataggtacaagagttacagcccttatgacatgttggaaagcatcaggaaagaggttaaaggagacctggaaaatgctttcctgaacctggttcagtgcattcagaacaagcccctgtattttgctgatcggctgtatgactccatgaagggcaaggggacgcgagataaggtcctgatcagaatcatggtctcccgcagtgaagtggacatgttgaaaattaggtctgaattcaagagaaagtacggcaagtccctgtactattatatccagcaagacactaagggcgactaccagaaagcgctgctgtacctgtgtggtggagatgactgaagcccgacacggcctgagcgtccagaaatggtgctcaccatgcttccagctaacaggtctagaaaaccagcttgcgaataacagtccccgtggccatccctgtgagggtgacgttagcattacccccaacctcattttagttgcctaagcattgcctggccttcctgtctagtctctcctgtaagccaaagaaatgaacattccaaggagttggaagtgaagtctatgatgtgaaacactttgcctcctgtgtactgtgtcataaacagatgaataaactgaatttgtactttaaaaaaaaaaaaaaaaaaa

SEQ ID NO: 6 - protein, 339 aa, Homo sapiens
MSTVHEILCKLSLEGDHSTPPSAYGSVKAYTNFDAERDALNIETAIKTKGVDEVTIVNILTNRSNAQRQDIAFAYQRRTKKELASALKSALSGHLETVILGLLKTPAQYDASELKASMKGLGTDEDSLIEIICSRTNQELQEINRVYKEMYKTDLEKDIISDTSGDFRKLMVALAKGRRAEDGSVIDYELIDQDARDLYDAGVKRKGTDVPKWISIMTERSVPHLQKVFDRYKSYSPYDMLESIRKEVKGDLENAFLNLVQCIQNKPLYFADRLYDSMKGKGTRDKVLIRIMVSRSEVDMLKIRSEFKRKYGKSLYYYIQQDTKGDYQKALLYLCGGDD

SEQ ID NO: 7 - DNA, 1362 bp, Homo sapiens
catttggggacgctctcagctctcggcgcacggcccagcttccttcaaaatgtctactgttcacgaaatcctgtgcaagctcagcttggagggtgatcactctacacccccaagtgcatatgggtctgtcaaagcctatactaactttgatgctgagcgggatgctttgaacattgaaacagccatcaagaccaaaggtgtggatgaggtcaccattgtcaacattttgaccaaccgcagcaatgcacagagacaggatattgccttcgcctaccagagaaggaccaaaaaggaacttgcatcagcactgaagtcagccttatctggccacctggagacggtgattttgggcctattgaagacacctgctcagtatgacgcttctgagctaaaagcttccatgaaggggctgggaaccgacgaggactctctcattgagatcatctgctccagaaccaaccaggagctgcaggaaattaacagagtctacaaggaaatgtacaagactgatctggagaaggacattatttcggacacatctggtgacttccgcaagctgatggttgccctggcaaagggtagaagagcagaggatggctctgtcattgattatgaactgattgaccaagatgctcgggatctctatgacgctggagtgaagaggaaaggaactgatgttcccaagtggatcagcatcatgaccgagcggagcgtgccccacctccagaaagtatttgataggtacaagagttacagcccttatgacatgttggaaagcatcaggaaagaggttaaaggagacctggaaaatgctttcctgaacctggttcagtgcattcagaacaagcccctgtattttgctgatcggctgtatgactccatgaagggcaaggggacgcgagataaggtcctgatcagaatcatggtctcccgcagtgaagtggacatgttgaaaattaggtctgaattcaagagaaagtacggcaagtccctgtactattatatccagcaagacactaagggcgactaccagaaagcgctgctgtacctgtgtggtggagatgactgaagcccgacacggcctgagcgtccagaaatggtgctcaccatgcttccagctaacaggtctagaaaaccagcttgcgaataacagtccccgtggccatccctgtgagggtgacgttagcattacccccaacctcattttagttgcctaagcattgcctggccttcctgtctagtctctcctgtaagccaaagaaatgaacattccaaggagttggaagtgaagtctatgatgtgaaacactttgcctcctgtgtactgtgtcataaacagatgaataaactgaatttgtacttt

SEQ ID NO: 8 - protein, 339 aa, Homo sapiens; identical to SEQ ID NO: 6

SEQ ID NO: 9 - DNA, 1982 bp, Homo sapiens
gcagaggaggagcgcacgccggcctcgaagaacttctgcttgggtggctgaactctgatcttgacctagagtcatggccatggcaaccaaaggaggtactgtcaaagctgcttcaggattcaatgccatggaagatgcccagaccctgaggaaggccatgaaagggctcggcaccgatgaagacgccattattagcgtccttgcctaccgcaacaccgcccagcgccaggagatcaggacagcctacaagagcaccatcggcagggacttgatagacgacctgaagtcagaactgagtggcaacttcgagcaggtgattgtggggatgatgacgcccacggtgctgtatgacgtgcaagagctgcgaagggccatgaagggagccggcactgatgagggctgcctaattgagatcctggcctcccggacccctgaggagatccggcgcataagccaaacctaccagcagcaatatggacggagccttgaagatgacattcgctctgacacatcgttcatgttccagcgagtgctggtgtctctgtcagctggtgggagggatgaaggaaattatctggacgatgctctcgtgagacaggatgcccaggacctgtatgaggctggagagaagaaatgggggacagatgaggtgaaatttctaactgttctctgttcccggaaccgaaatcacctgttgcatgtgtttgatgaatacaaaaggatatcacagaaggatattgaacagagtattaaatctgaaacatctggtagctttgaagatgctctgctggctatagtaaagtgcatgaggaacaaatctgcatattttgctgaaaagctctataaatcgatgaagggcttgggcaccgatgataacaccctcatcagagtgatggtttctcgagcagaaattgacatgttggatatccgggcacacttcaagagactctatggaaagtctctgtactcgttcatcaagggtgacacatctggagactacaggaaagtactgcttgttctctgtggaggagatgattaaaataaaaatcccagaaggacaggaggattctcaacactttgaatttttttaacttcatttttctacactgctattatcattatctcagaatgcttatttccaattaaaacgcctacagctgcctcctagaatatagactgtctgtattattattcacctataattagtcattatgatgctttaaagctgtacttgcatttcaaagcttataagatataaatggagattttaaagtagaaataaatatgtattccatgtttttaaaagattactttctactttgtgtttcacagacattgaatatattaaattattccatattttcttttcagtgaaaaattttttaaatggaagactgttctaaaatcacttttttccctaatccaatttttagagtggctagtagtttcttcatttgaaattgtaagcatccggtcagtaagaatgcccatccagttttctatatttcatagtcaaagccttgaaagcatctacaaatctctttttttaggttttgtccatagcatcagttgatccttactaagtttttcatgggagacttccttcatcacatcttatgttgaaatcactttctgtagtcaaagtataccaaaaccaatttatctgaactaaattctaaagtatggttatacaaaccatatacatctggttaccaaacataaatgctgaacattccatattattatagttaatgtcttaatccagcttgcaagtgaatggaaaaaaaaataagcttcaaactaggtattctgggaatgatgtaatgctctgaatttagtatgatataaagaaaacttttttgtgctaaaaatactttttaaaatcaattttgttgattgtagtaatttctatttgcactgtgcctttcaactccagaaacattctaagatgtacttggatttaattaaaaagttcactttgt

SEQ ID NO: 10 - protein, 321 aa, Homo sapiens
MAMATKGGTVKAASGFNAMEDAQTLRKAMKGLGTDEDAIISVLAYRNTAQRQEIRTAYKSTIGRDLIDDLKSELSGNFEQVIVGMMTPTVLYDVQELRRAMKGAGTDEGCLIEILASRTPEEIRRISQTYQQQYGRSLEDDIRSDTSFMFQRVLVSLSAGGRDEGNYLDDALVRQDAQDLYEAGEKKWGTDEVKFLTVLCSRNRNHLLHVFDEYKRISQKDIEQSIKSETSGSFEDALLAIVKCMRNKSAYFAEKLYKSMKGLGTDDNTLIRVMVSRAEIDMLDIRAHFKRLYGKSLYSFIKGDTSGDYRKVLLVLCGGDD

SEQ ID NO: 11 - DNA, 1316 bp, Homo sapiens
agctagacgccccgaggtcggagtgaagcgccgggaccgagccccgtctcccagggagtccggggcgcacggcaccgaggagagcgcgggagccaacctgggcgcatcatgcgcagggcccgggacgctgggccggtctacaccgccgcctgggtcacgtggcccggacgggccggcggctgccccggccggggggcgggggtcgcgccggggttgcgctggacgacggagagcggcgggcccgcagcggcctggagcctcccaacccgcgccgcgctggccctcgagcgtaggagccgccccctgcccccccgcgccggccccgcgcccggccgcccgccccctatatagcgcgccccagcagggcccgcgccaggccgccagcctcggagtgggcgcgggacagtgcgcggcgccccgcagccaggcccccgcccccgccgcatccacctcctccgccgcctgcgacccaacgggcgccccccgccggcagctcgcgccgggcccccgcggccaccatgaagaaggaggtgtgctccgtggccttcctcaaggccgtgttcgcagagttcttggccaccctcatcttcgtcttctttggcctgggctcggccctcaagtggccgtcggcgctgcctaccatcctgcagatcgcgctggcgtttggcctggccataggcacgctggcccaggccctgggacccgtgagcggcggccacatcaaccccgccatcaccctggccctcttggtgggcaaccagatctcgctgctccgggctttcttctacgtggcggcccagctggtgggcgccattgccggggctggcatcctctacggtgtggcaccgctcaatgcccggggcaatctggccgtcaacgcgctcaacaacaacacaacgcagggccaggccatggtggtggagctgattctgaccttccagctggcactctgcatcttcgcctccactgactcccgccgcaccagccctgtgggctccccagccctgtccattggcctgtctgtcaccctgggccaccttgtcggaatctacttcactggctgctccatgaacccagcccgctcttttggccctgcggtggtcatgaatcggttcagccccgctcactgggttttctgggtagggcccatcgtgggggcggtcctggctgccatcctttacttctacctgctcttccccaactccctgagcctgagtgagcgtgtggccatcatcaaaggcacgtatgagcctgacgaggactgggaggagcagcgggaagagcggaagaagaccatggagctgaccacccgctga

SEQ ID NO: 12 - protein, 265 aa, Homo sapiens
MKKEVCSVAFLKAVFAEFLATLIFVFFGLGSALKWPSALPTILQIALAFGLAIGTLAQALGPVSGGHINPAITLALLVGNQISLLRAFFYVAAQLVGAIAGAGILYGVAPLNARGNLAVNALNNNTTQGQAMVVELILTFQLALCIFASTDSRRTSPVGSPALSIGLSVTLGHLVGIYFTGCSMNPARSFGPAVVMNRFSPAHWVFWVGPIVGAVLAAILYFYLLFPNSLSLSERVAIIKGTYEPDEDWEEQREERKKTMELTTR

SEQ ID NO: 13 - DNA, 1653 bp, Homo sapiens
acgtccggggaggggccaggtgagcggcagacccggcacgcaggtgggggccggcggggtccgtggccagagctgcagagagacaaggcggcggcggctgctgtgctgggtgcagtgaggaagaggccctcggtggtgcccatggctggccaggatcctgcgctgagcacgagtcacccgttctacgacgtggccagacatggcattctgcaggtggcaggggatgaccgctttggaagacgtgttgtcacgttcagctgctgccggatgccgccctcccacgagctggaccaccagcggctgctggagtatttgaagtacacactggaccaatacgttgagaacgattataccatcgtctatttccactacgggctgaacagccggaacaagccttccctgggctggctccagagcgcatacaaggagttcgataggaaagacggggatctcactatgtggcccaggctggtctcgaactccaagctcaagcgatcctcccacctcagcctcccaaagtactgggattacaggtacaagaagaacttgaaggccctctacgtggtgcaccccaccagcttcatcaaggtcctgtggaacatcttgaagcccctcatcagtcacaagtttgggaagaaagtcatctatttcaactacctgagtgagctccacgaacaccttaaatacgaccagctggtcatccctcccgaagttttgcggtacgatgagaagctccagagcctgcacgagggccggacgccgcctcctaccaagacaccaccgccgcggcccccgctgcccacacagcagtttggcgtcagtctgcaatacctcaaagacaaaaatcaaggcgaactcatcccccctgtgctgaggttcacagtgacgtacctgagagagaaaggcctgcgcaccgagggcctgttccggagatccgccagcgtgcagaccgtccgcgagatccagaggctctacaaccaagggaagcccgtgaactttgacgactacggggacattcacatccctgccgtgatcctgaagaccttcctgcgagagctgccccagccgcttctgaccttccaggcctacgagcagattctcgggatcacctgtgtggagagcagcctgcgtgtcactggctgccgccagatcttacggagcctcccagagcacaactacgtcgtcctccgctacctcatgggctttctgcatgcggtgtcccgggagagcatcttcaacaaaatgaacagctctaacctggcctgtgtcttcgggctgaatttgatctggccatcccagggggtctcctccctgagtgcccttgtgcccctgaacatgttcactgaactgctgatcgagtactatgaaaagatcttcagcaccccggaggcacctggggagcacggcctggcaccatgggaacaggggagcagggcagcccctttgcaggaggctgtgccacggacacaagccacgggcctcaccaagcctaccctacctccgagtcccctgatggcagccagaagacgtctctagtgttgcgaacactctgtatgtttcgagctacctcccacacctgtctgtgcacttgtatgttttgtaaacttggcatctgtaaaaataaccagccattagatgaattcagaaccttct

SEQ ID NO: 14 - protein, 464 aa, Homo sapiens
MAGQDPALSTSHPFYDVARHGILQVAGDDRFGRRVVTFSCCRMPPSHELDHQRLLEYLKYTLDQYVENDYTIVYFHYGLNSRNKPSLGWLQSAYKEFDRKDGDLTMWPRLVSNSKLKRSSHLSLPKYWDYRYKKNLKALYVVHPTSFIKVLWNILKPLISHKFGKKVIYFNYLSELHEHLKYDQLVIPPEVLRYDEKLQSLHEGRTPPPTKTPPPRPPLPTQQFGVSLQYLKDKNQGELIPPVLRFTVTYLREKGLRTEGLFRRSASVQTVREIQRLYNQGKPVNFDDYGDIHIPAVILKTFLRELPQPLLTFQAYEQILGITCVESSLRVTGCRQILRSLPEHNYVVLRYLMGFLHAVSRESIFNKMNSSNLACVFGLNLIWPSQGVSSLSALVPLNMFTELLIEYYEKIFSTPEAPGEHGLAPWEQGSRAAPLQEAVPRTQATGLTKPTLPPSPLMAARRRL

SEQ ID NO: 15 - DNA, 2043 bp, Homo sapiens
atgaggactctccgcaggttgaagttcatgagttcgcccagcctcagtgacctgggcaagagagagccggccgccgccgcggacgagcggggcacgcagcagcgccgggcctgcgccaacgccacctggaacagcatccacaacggggtgatcgccgtcttccagcgcaaggggctgcccgaccaggagctcttcagcctcaacgagggcgtccggcagctgttgaagacagagctggggtccttcttcacggagtacctgcagaaccagctgctgacaaaaggcatggtgatccttcgggacaagattcgcttctatgagggacagaagctgctggactcactggcagagacctgggacttcttcttcagtgacgtgctgcccatgctgcaggccatcttctacccggtgcagggcaaggagccatcggtgcgccagctggccctgctgcacttccggaatgccatcaccctcagtgtgaagctagaggatgcgctggcccgggcccatgcccgtgtgccccctgccatcgtgcagatgctgctggtgctgcagggggtacatgagtccaggggcgtgactgaggactacctgcgcctggagacgctggtccagaaggtggtgtcgccatacctgggcacctacggcctccactccagcgaggggcccttcacccattcctgcatcctggagctgcagagagacaaggcggcggcggctgctgtgctgggtgcagtgaggaagaggccctcggtggtgcccatggctggccaggatcctgcgctgagcacgagtcacccgttctacgacgtggccagacatggcattctgcaggtggcaggggatgaccgctttggaagacgtgttgtcacgttcagctgctgccggatgccaccctcccacgagctggaccaccagcggctgctggagtacaagaagaacttgaaggccctctacgtggtgcaccccaccagcttcatcaaggtcctgtggaacatcttgaagcccctcatcagtcacaagtttgggaagaaagtcatctatttcaactacctgagtgagctccacgaacaccttaaatacgaccagctggtcatccctcccgaagttttgcggtacgatgagaagctccagagcctgcacgagggccggacgccgcctcccaccaagacaccaccgccgcggcccccgctgcccacacagcagtttggcgtcagtctgcaatacctcaaagacaaaaatcaaggcgaactcatcccccctgtgctgaggttcacagtgacgtacctgagagagaaaggcctgcgcaccgagggcctgttccggagatccgccagcgtgcagaccgtccgcgagatccagaggctctacaaccaagggaagcccgtgaactttgacgactacggggacattcacatccctgccgtgatcctgaagaccttcctgcgagagctgccccagccgcttctgaccttccaggcctacgagcagattctcgggatcacctgtgtggagagcagcctgcgtgtcactggctgccgccagatcttacggagcctcccagagcacaactacgtcgtcctccgctacctcatgggcttcctgcatgcggtgtcccgggagagcatcttcaacaaaatgaacagctctaacctggcctgtgtcttcgggctgaatttgatctggccatcccagggggtctcctccctgagtgcccttgtgcccctgaacatgttcactgaactgctgatcgagtactatgaaaagatcttcagcaccccggaggcacctggggagcacggcctggcaccatgggaacaggggagcagggcagcccctttgcaggaggctgtgccacggacacaagccacgggcctcaccaagcctaccctacctccgagtcccctgatggcagccagaagacgtctctagtgttgcgaacactctgtatatttcgagctacctcccacacctgtctgtgcacttgtatgttttgtaaacttggcatctgtaaaaataaccagccattagatgaattcagaa

SEQ ID NO: 16 - protein, 643 aa, Homo sapiens
MRTLRRLKFMSSPSLSDLGKREPAAAADERGTQQRRACANATWNSIHNGVIAVFQRKGLPDQELFSLNEGVRQLLKTELGSFFTEYLQNQLLTKGMVILRDKIRFYEGQKLLDSLAETWDFFFSDVLPMLQAIFYPVQGKEPSVRQLALLHFRNAITLSVKLEDALARAHARVPPAIVQMLLVLQGVHESRGVTEDYLRLETLVQKVVSPYLGTYGLHSSEGPFTHSCILELQRDKAAAAAVLGAVRKRPSVVPMAGQDPALSTSHPFYDVARHGILQVAGDDRFGRRVVTFSCCRMPPSHELDHQRLLEYKKNLKALYVVHPTSFIKVLWNILKPLISHKFGKKVIYFNYLSELHEHLKYDQLVIPPEVLRYDEKLQSLHEGRTPPPTKTPPPRPPLPTQQFGVSLQYLKDKNQGELIPPVLRFTVTYLREKGLRTEGLFRRSASVQTVREIQRLYNQGKPVNFDDYGDIHIPAVILKTFLRELPQPLLTFQAYEQILGITCVESSLRVTGCRQILRSLPEHNYVVLRYLMGFLHAVSRESIFNKMNSSNLACVFGLNLIWPSQGVSSLSALVPLNMFTELLIEYYEKIFSTPEAPGEHGLAPWEQGSRAAPLQEAVPRTQATGLTKPTLPPSPLMAARRRL

SEQ ID NO: 17 - DNA, 2274 bp, Homo sapiens
atgaggactctccgcaggttgaagttcatgagttcgcccagcctcagtgacctgggcaagagagagccggccgccgccgcggacgagcggggcacgcagcagcgccgggcctgcgccaacgccacctggaacagcatccacaacggggtgatcgccgtcttccagcgcaaggggctgcccgaccaggagctcttcagcctcaacgagggcgtccggcagctgttgaagacagagctggggtccttcttcacggagtacctgcagaaccagctgctgacaaaaggcatggtgatccttcgggacaagattcgcttctatgagggacagaagctgctggactcactggcagagacctgggacttcttcttcagtgacgtgctgcccatgctgcaggccatcttctacccggtgcagggcaaggagccatcggtgcgccagctggccctgctgcacttccggaatgccatcaccctcagtgtgaagctagaggatgcgctggcccgggcccatgcccgtgtgccccctgccatcgtgcagatgctgctggtgctgcagggggtacatgagtccaggggcgtgactgaggactacctgcgcctggagacgctggtccagaaggtggtgtcgccatacctgggcacctacggcctccactccagcgaggggcccttcacccattcctgcatcctggagctgcagagagacaaggcggcggcggctgctgtgctgggtgcagtgaggaagaggccctcggtggtgcccatggctggccaggatcctgcgctgagcacgagtcacccgttctacgacgtggccagacatggcattctgcaggtggcaggggatgaccgctttggaagacgtgttgtcacgttcagctgctgccggatgccaccctcccacgagctggaccaccagcggctgctggagtatttgaagtacacactggaccaatacgttgagaacgattataccatcgtctatttccactacgggctgaacagccggaacaagccttccctgggctggctccagagcgcatacaaggagttcgataggaaagacggggatctcactatgtggcccaggctggtctcgaactccaagctcaagcgatcctcccacctcagcctcccaaagtactgggattacaggtacaagaagaacttgaaggccctctacgtggtgcaccccaccagcttcatcaaggtcctgtggaacatcttgaagcccctcatcagtcacaagtttgggaagaaagtcatctatttcaactacctgagtgagctccacgaacaccttaaatacgaccagctggtcatccctcccgaagttttgcggtacgatgagaagctccagagcctgcacgagggccggacgccgcctcccaccaagacaccaccgccgcggcccccgctgcccacacagcagtttggcgtcagtctgcaatacctcaaagacaaaaatcaaggcgaactcatcccccctgtgctgaggttcacagtgacgtacctgagagagaaaggcctgcgcaccgagggcctgttccggagatccgccagcgtgcagaccgtccgcgagatccagaggctctacaaccaagggaagcccgtgaactttgacgactacggggacattcacatccctgccgtgatcctgaagaccttcctgcgagagctgccccagccgcttctgaccttccaggcctacgagcagattctcgggatcacctgtgtggagagcagcctgcgtgtcactggctgccgccagatcttacggagcctcccagagcacaactacgtcgtcctccgctacctcatgggcttcctgcatgcggtgtcccgggagagcatcttcaacaaaatgaacagctctaacctggcctgtgtcttcgggctgaatttgatctggccatcccagggggtctcctccctgagtgcccttgtgcccctgaacatgttcactgaactgctgatcgagtactatgaaaagatcttcagcaccccggaggcacctggggagcacggcctggcaccatgggaacaggggagcagggcagcccctttgcaggaggctgtgccacggacacaagccacgggcctcaccaagcctaccctacctccgagtcccctgatggcagccagaagacgtctctagtgttgcgaacactctgtatatttcgagctacctcccacacctgtctgtgcacttgtatgttttgtaaacttggcatctgtaaaaataaccagccattagatgaattcagaaccttct

SEQ ID NO: 18 - protein, 751 aa, Homo sapiens
  VARIANT (1)...(751): Xaa = Any Amino Acid
MRTLRRLKFMSSPSLSDLGKREPAAAADERGTQQRRACANATWNSIHNGVIAVFQRKGLPDQELFSLNEGVRQLLKTELGSFFTEYLQNQLLTKGMVILRDKIRFYEGQKLLDSLAETWDFFFSDVLPMLQAIFYPVQGKEPSVRQLALLHFRNAITLSVKLEDALARAHARVPPAIVQMLLVLQGVHESRGVTEDYLRLETLVQKVVSPYLGTYGLHSSEGPFTHSCILELQRDKAAAAAVLGAVRKRPSVVPMAGQDPALSTSHPFYDVARHGILQVAGDDRFGRRVVTFSCCRMPPSHELDHQRLLEYLKYTLDQYVENDYTIVYFHYGLNSRNKPSLGWLQSAYKEFDRKDGDLTMWPRLVSNSKLKRSSHLSLPKYWDYRYKKNLKALYVVHPTSFIKVLWNILKPLISHKFGKKVIYFNYLSELHEHLKYDQLVIPPEVLRYDEKLQSLHEGRTPPPTKTPPPRPPLPTQQFGVSLQYLKDKNQGELIPPVLRFTVTYLREKGLRTEGLFRRSASVQTVREIQRLYNQGKPVNFDDYGDIHIPAVILKTFLRELPQPLLTFQAYEQILGITCVESSLRVTGCRQILRSLPEHNYVVLRYLMGFLHAVSRESIFNKMNSSNLACVFGLNLIWPSQGVSSLSALVPLNMFTELLIEYYEKIFSTPEAPGEHGLAPWEQGSRAAPLQEAVPRTQATGLTKPTLPPSPLMAARRRLXCCEHSVYFELPPTPVCALVCFVNLASVKITSH

SEQ ID NO: 19 - protein, 718 aa, Homo sapiens
MRTLRRLKFMSSPSLSDLGKREPAAAADERGTQQRRACANATWNSIHNGVIAVFQRKGLPDQELFSLNEGVRQLLKTELGSFFTEYLQNQLLTKGMVILRDKIRFYEGQKLLDSLAETWDFFFSDVLPMLQAIFYPVQGKEPSVRQLALLHFRNAITLSVKLEDALARAHARVPPAIVQMLLVLQGVHESRGVTEDYLRLETLVQKVVSPYLGTYGLHSSEGPFTHSCILELQRDKAAAAAVLGAVRKRPSVVPMAGQDPALSTSHPFYDVARHGILQVAGDDRFGRRVVTFSCCRMPPSHELDHQRLLEYLKYTLDQYVENDYTIVYFHYGLNSRNKPSLGWLQSAYKEFDRKDGDLTMWPRLVSNSKLKRSSHLSLPKYWDYRYKKNLKALYVVHPTSFIKVLWNILKPLISHKFGKKVIYFNYLSELHEHLKYDQLVIPPEVLRYDEKLQSLHEGRTPPPTKTPPPRPPLPTQQFGVSLQYLKDKNQGELIPPVLRFTVTYLREKGLRTEGLFRRSASVQTVREIQRLYNQGKPVNFDDYGDIHIPAVILKTFLRELPQPLLTFQAYEQILGITCVESSLRVTGCRQILRSLPEHNYVVLRYLMGFLHAVSRESIFNKMNSSNLACVFGLNLIWPSQGVSSLSALVPLNMFTELLIEYYEKIFSTPEAPGEHGLAPWEQGSRAAPLQEAVPRTQATGLTKPTLPPSPLMAARRRL

SEQ ID NO: 20 - DNA, 1431 bp, Homo sapiens
acgtccggggaggggccaggtgagcggcagacccggcacgcaggtgggggccggcggggtccgtggccagagctgcagagagacaaggcggcggcggctgctgtgctgggtgcagtgaggaagaggccctcggtggtgcccatggctggccaggatcctgcgctgagcacgagtcacccgttctacgacgtggccagacatggcattctgcaggtggcaggggatgaccgctttggaagacgtgttgtcacgttcagctgctgccggatgccaccctcccacgagctggaccaccagcggctgctggacaggtacaagaagaacttgaaggccctctacgtggtgcaccccaccagcttcatcaaggtcctgtggaacatcttgaagcccctcatcagtcacaagtttgggaagaaagtcatctatttcaactacctgagtgagctccacgaacaccttaaatacgaccagctggtcatccctcccgaagttttgcggtacgatgagaagctccagagcctgcacgagggccggacgccgcctcccaccaagacaccaccgccgcggcccccgctgcccacacagcagtttggcgtcagtctgcaatacctcaaagacaaaaatcaaggcgaactcatcccccctgtgctgaggttcacagtgacgtacctgagagagaaaggcctgcgcaccgagggcctgttccggagatccgccagcgtgcagaccgtccgcgagatccagaggctctacaaccaagggaagcccgtgaactttgacgactacggggacattcacatccctgccgtgatcctgaagaccttcctgcgagagctgccccagccgcttctgaccttccaggcctacgagcagattctcgggatcacctgtgtggagagcagcctgcgtgtcactggctgccgccagatcttacggagcctcccagagcacaactacgtcgtcctccgctacctcatgggcttcctgcatgcggtgtcccgggagagcatcttcaacaaaatgaacagctctaacctggcctgtgtcttcgggctgaatttgatctggccatcccagggggtctcctccctgagtgcccttgtgcccctgaacatgttcactgaactgctgatcgagtactatgaaaagatcttcagcaccccggaggcacctggggagcacggcctggcaccatgggaacaggggagcagggcagcccctttgcaggaggctgtgccacggacacaagccacgggcctcaccaagcctaccctacctccgagtcccctgatggcagccagaagacgtctctagtgttgcgaacactctgtatatttcgagctacctcccacacctgtctgtgcacttgtatgttttgtaaacttggcatctgtaaaaataaccagccattagatgaattcagaaccttct

SEQ ID NO: 21 - protein, 390 aa, Homo sapiens
MAGQDPALSTSHPFYDVARHGILQVAGDDRFGRRVVTFSCCRMPPSHELDHQRLLDRYKKNLKALYVVHPTSFIKVLWNILKPLISHKFGKKVIYFNYLSELHEHLKYDQLVIPPEVLRYDEKLQSLHEGRTPPPTKTPPPRPPLPTQQFGVSLQYLKDKNQGELIPPVLRFTVTYLREKGLRTEGLFRRSASVQTVREIQRLYNQGKPVNFDDYGDIHIPAVILKTFLRELPQPLLTFQAYEQILGITCVESSLRVTGCRQILRSLPEHNYVVLRYLMGFLHAVSRESIFNKMNSSNLACVFGLNLIWPSQGVSSLSALVPLNMFTELLIEYYEKIFSTPEAPGEHGLAPWEQGSRAAPLQEAVPRTQATGLTKPTLPPSPLMAARRRL

SEQ ID NO: 22 - DNA, 2019 bp, Homo sapiens
atgaggactctccgcaggttgaagttcatgagttcgcccagcctcagtgacctgggcaagagagagccggccgccgccgcggacgagcggggcacgcagcagcgccgggcctgcgccaacgccacctggaacagcatccacaacggggtgatcgccgtcttccagcgcaaggggctgcccgaccaggagctcttcagcctcaacgagggcgtccggcagctgttgaagacagagctggggtccttcttcacggagtacctgcagaaccagctgctgacaaaaggcatggtgatccttcgggacaagattcgcttctatgagggacagaagctgctggactcactggcagagacctgggacttcttcttcagtgacgtgctgcccatgctgcaggccatcttctacccggtgcagggcaaggagccatcggtgcgccagctggccctgctgcacttccggaatgccatcaccctcagtgtgaagctagaggatgcgctggcccgggcccatgcccgtgtgccccctgccatcgtgcagatgctgctggtgctgcagggggtacatgagtccaggggcgtgactgaggactacctgcgcctggagacgctggtccagaaggtggtgtcgccatacctgggcacctacggcctccactccagcgaggggcccttcacccattcctgcatcctggagctgcagagagacaaggcggcggcggctgctgtgctgggtgcagtgaggaagaggccctcggtggtgcccatggctggccaggatcctgcgctgagcacgagtcacccgttctacgacgtggccagacatggcattctgcaggtggcaggggatgaccgctttggaagacgtgttgtcacgttcagctgctgccggatgccaccctcccacgagctggaccaccagcggctgctggagtatttgaagtacacactggaccaatacgttgagaacgattataccatcgtctatttccactacgggctgaacagccggaacaagccttccctgggctggctccagagcgcatacaaggagttcgataggaaagacggggatctcactatgtggcccaggctggtctcgaactccaagctcaagcgatcctcccacctcagcctcccaaagtactgggattacaggtacaagaagaacttgaaggccctctacgtggtgcaccccaccagcttcatcaaggtcctgtggaacatcttgaagcccctcatcagtcacaagtttgggaagaaagtcatctatttcaactacctgagtgagctccacgaacaccttaaatacgaccagctggtcatccctcccgaagttttgcggtacgatgagaagctccagagcctgcacgagggccggacgccgcctcccaccaagacaccaccgccgcggcccccgctgcccacacagcagtttggcgtcagtctgcaatacctcaaagacaaaaatcaaggcgaactcatcccccctgtgctgaggttcacagtgacgtacctgagagagaaaggcctcccagagcacaactacgtcgtcctccgctacctcatgggcttcctgcatgcggtgtcccgggagagcatcttcaacaaaatgaacagctctaacctggcctgtgtcttcgggctgaatttgatctggccatcccagggggtctcctccctgagtgcccttgtgcccctgaacatgttcactgaactgctgatcgagtactatgaaaagatcttcagcaccccggaggcacctggggagcacggcctggcaccatgggaacaggggagcagggcagcccctttgcaggaggctgtgccacggacacaagccacgggcctcaccaagcctaccctacctccgagtcccctgatggcagccagaagacgtctctagtgttgcgaacactctgtatatttcgagctacctcccacacctgtctgtgcacttgtatgttttgtaaacttggcatctgtaaaaataaccagccattagatgaattcagaaccttct

SEQ ID NO: 23 - protein, 633 aa, Homo sapiens
MRTLRRLKFMSSPSLSDLGKREPAAAADERGTQQRRACANATWNSIHNGVIAVFQRKGLPDQELFSLNEGVRQLLKTELGSFFTEYLQNQLLTKGMVILRDKIRFYEGQKLLDSLAETWDFFFSDVLPMLQAIFYPVQGKEPSVRQLALLHFRNAITLSVKLEDALARAHARVPPAIVQMLLVLQGVHESRGVTEDYLRLETLVQKVVSPYLGTYGLHSSEGPFTHSCILELQRDKAAAAAVLGAVRKRPSVVPMAGQDPALSTSHPFYDVARHGILQVAGDDRFGRRVVTFSCCRMPPSHELDHQRLLEYLKYTLDQYVENDYTIVYFHYGLNSRNKPSLGWLQSAYKEFDRKDGDLTMWPRLVSNSKLKRSSHLSLPKYWDYRYKKNLKALYVVHPTSFIKVLWNILKPLISHKFGKKVIYFNYLSELHEHLKYDQLVIPPEVLRYDEKLQSLHEGRTPPPTKTPPPRPPLPTQQFGVSLQYLKDKNQGELIPPVLRFTVTYLREKGLPEHNYVVLRYLMGFLHAVSRESIFNKMNSSNLACVFGLNLIWPSQGVSSLSALVPLNMFTELLIEYYEKIFSTPEAPGEHGLAPWEQGSRAAPLQEAVPRTQATGLTKPTLPPSPLMAARRRL

SEQ ID NO: 24 - DNA, 1398 bp, Homo sapiens
acgtccggggaggggccaggtgagcggcagacccggcacgcaggtgggggccggcggggtccgtggccagagctgcagagagacaaggcggcggcggctgctgtgctgggtgcagtgaggaagaggccctcggtggtgcccatggctggccaggatcctgcgctgagcacgagtcacccgttctacgacgtggccagacatggcattctgcaggtggcaggggatgaccgctttggaagacgtgttgtcacgttcagctgctgccggatgccaccctcccacgagctggaccaccagcggctgctggagtatttgaagtacacactggaccaatacgttgagaacgattataccatcgtctatttccactacgggctgaacagccggaacaagccttccctgggctggctccagagcgcatacaaggagttcgataggaaagacggggatctcactatgtggcccaggctggtctcgaactccaagctcaagcgatcctcccacctcagcctcccaaagtactgggattacaggtacaagaagaacttgaaggccctctacgtggtgcaccccaccagcttcatcaaggtcctgtggaacatcttgaagcccctcatcagtcacaagtttgggaagaaagtcatctatttcaactacctgagtgagctccacgaacaccttaaatacgaccagctggtcatccctcccgaagttttgcggtacgatgagaagctccagagcctgcacgagggccggacgccgcctcccaccaagacaccaccgccgcggcccccgctgcccacacagcagtttggcgtcagtctgcaatacctcaaagacaaaaatcaaggcgaactcatcccccctgtgctgaggttcacagtgacgtacctgagagagaaaggcctcccagagcacaactacgtcgtcctccgctacctcatgggcttcctgcatgcggtgtcccgggagagcatcttcaacaaaatgaacagctctaacctggcctgtgtcttcgggctgaatttgatctggccatcccagggggtctcctccctgagtgcccttgtgcccctgaacatgttcactgaactgctgatcgagtactatgaaaagatcttcagcaccccggaggcacctggggagcacggcctggcaccatgggaacaggggagcagggcagcccctttgcaggaggctgtgccacggacacaagccacgggcctcaccaagcctaccctacctccgagtcccctgatggcagccagaagacgtctctagtgttgcgaacactctgtatatttcgagctacctcccacacctgtctgtgcacttgtatgttttgtaaacttggcatctgtaaaaataaccagccattagatgaattcagaaccttct

SEQ ID NO: 25 - protein, 379 aa, Homo sapiens
MAGQDPALSTSHPFYDVARHGILQVAGDDRFGRRVVTFSCCRMPPSHELDHQRLLEYLKYTLDQYVENDYTIVYFHYGLNSRNKPSLGWLQSAYKEFDRKDGDLTMWPRLVSNSKLKRSSHLSLPKYWDYRYKKNLKALYVVHPTSFIKVLWNILKPLISHKFGKKVIYFNYLSELHEHLKYDQLVIPPEVLRYDEKLQSLHEGRTPPPTKTPPPRPPLPTQQFGVSLQYLKDKNQGELIPPVLRFTVTYLREKGLPEHNYVVLRYLMGFLHAVSRESIFNKMNSSNLACVFGLNLIWPSQGVSSLSALVPLNMFTELLIEYYEKIFSTPEAPGEHGLAPWEQGSRAAPLQEAVPRTQATGLTKPTLPPSPLMAARRRL

SEQ ID NO: 26 - DNA, 1787 bp, Homo sapiens
atgaggactctccgcaggttgaagttcatgagttcgcccagcctcagtgacctgggcaagagagagccggccgccgccgcggacgagcggggcacgcagcagcgccgggcctgcgccaacgccacctggaacagcatccacaacggggtgatcgccgtcttccagcgcaaggggctgcccgaccaggagctcttcagcctcaacgagggcgtccggcagctgttgaagacagagctggggtccttcttcacggagtacctgcagaaccagctgctgacaaaaggcatggtgatccttcgggacaagattcgcttctatgagggacagaagctgctggactcactggcagagacctgggacttcttcttcagtgacgtgctgcccatgctgcaggccatcttctacccggtgcagggcaaggagccatcggtgcgccagctggccctgctgcacttccggaatgccatcaccctcagtgtgaagctagaggatgcgctggcccgggcccatgcccgtgtgccccctgccatcgtgcagatgctgctggtgctgcagggggtacatgagtccaggggcgtgactgaggactacctgcgcctggagacgctggtccagaaggtggtgtcgccatacctgggcacctacggcctccactccagcgaggggcccttcacccattcctgcatcctggagctgcagagagacaaggcggcggcggctgctgtgctgggtgcagtgaggaagaggccctcggtggtgcccatggctggccaggatcctgcgctgagcacgagtcacccgttctacgacgtggccagacatggcattctgcaggtggcaggggatgaccgctttggaagacgtgttgtcacgttcagctgctgccggatgccaccctcccacgagctggaccaccagcggctgctggagtacaagaagaacttgaaggccctctacgtggtgcaccccaccagcttcatcaaggtcctgtggaacatcttgaagcccctcatcagtcacaagtttgggaagaaagtcatctatttcaactacctgagtgagctccacgaacaccttaaatacgaccagctggtcatccctcccgaagttttgcggtacgatgagaagctccagagcctgcacgagggccggacgccgcctcccaccaagacaccaccgccgcggcccccgctgcccacacagcagtttggcgtcagtctgcaatacctcaaagacaaaaatcaaggcgaactcatcccccctgtgctgaggttcacagtgacgtacctgagagagaaagcctcccagagcacaactacgtcgtcctccgctacctcatgggcttcctgcatgcggtgtcccgggagagcatcttcaacaaaatgaacagctctaacctggcctgtgtcttcgggctgaatttgatctggccatcccagggggtctcctccctgagtgcccttgtgcccctgaacatgttcactgaactgctgatcgagtactatgaaaagatcttcagcaccccggaggcacctggggagcacggcctggcaccatgggaacaggggagcagggcagcccctttgcaggaggctgtgccacggacacaagccacgggcctcaccaagcctaccctacctccgagtcccctgatggcagccagaagacgtctctagtgttgcgaacactctgtatatttcgagctacctcccacacctgtctgtgcacttgtatgttttgtaaacttggcatctgtaaaaataaccagccattagatgaattcagaa

SEQ ID NO: 27 - protein, 461 aa, Homo sapiens
MRTLRRLKFMSSPSLSDLGKREPAAAADERGTQQRRACANATWNSIHNGVIAVFQRKGLPDQELFSLNEGVRQLLKTELGSFFTEYLQNQLLTKGMVILRDKIRFYEGQKLLDSLAETWDFFFSDVLPMLQAIFYPVQGKEPSVRQLALLHFRNAITLSVKLEDALARAHARVPPAIVQMLLVLQGVHESRGVTEDYLRLETLVQKVVSPYLGTYGLHSSEGPFTHSCILELQRDKAAAAAVLGAVRKRPSVVPMAGQDPALSTSHPFYDVARHGILQVAGDDRFGRRVVTFSCCRMPPSHELDHQRLLEYKKNLKALYVVHPTSFIKVLWNILKPLISHKFGKKVIYFNYLSELHEHLKYDQLVIPPEVLRYDEKLQSLHEGRTPPPTKTPPPRPPLPTQQFGVSLQYLKDKNQGELIPPVLRFTVTYLREKASQSTTTSSSATSWASCMRCPGRASSTK

SEQ ID NO: 28 - DNA, 1176 bp, Homo sapiens
acgtccggggaggggccaggtgagcggcagacccggcacgcaggtgggggccggcggggtccgtggccagagctgcagagagacaaggcggcggcggctgctgtgctgggtgcagtgaggaagaggccctcggtggtgcccatggctggccaggatcctgcgctgagcacgagtcacccgttctacgacgtggccagacatggcattctgcaggtggcaggggatgaccgctttggaagacgtgttgtcacgttcagctgctgccggatgccaccctcccacgagctggaccaccagcggctgctggacaggtacaagaagaacttgaaggccctctacgtggtgcaccccaccagcttcatcaaggtcctgtggaacatcttgaagcccctcatcagtcacaagtttgggaagaaagtcatctatttcaactacctgagtgagctccacgaacaccttaaatacgaccagctggtcatccctcccgaagttttgcggtacgatgagaagctccagagcctgcacgagggccggacgccgcctcccaccaagacaccaccgccgcggcccccgctgcccacacagcagtttggcgtcagtctgcaatacctcaaagacaaaaatcaaggcgaactcatcccccctgtgctgaggttcacagtgacgtacctgagagagaaaggcctcccagagcacaactacgtcgtcctccgctacctcatgggcttcctgcatgcggtgtcccgggagagcatcttcaacaaaatgaacagctctaacctggcctgtgtcttcgggctgaatttgatctggccatcccagggggtctcctccctgagtgcccttgtgcccctgaacatgttcactgaactgctgatcgagtactatgaaaagatcttcagcaccccggaggcacctggggagcacggcctggcaccatgggaacaggggagcagggcagcccctttgcaggaggctgtgccacggacacaagccacgggcctcaccaagcctaccctacctccgagtcccctgatggcagccagaagacgtctctagtgttgcgaacactctgtatatttcgagctacctcccacacctgtctgtgcacttgtatgttttgtaaacttggcatctgtaaaaataaccagccattagatgaattcagaaccttct

SEQ ID NO: 29 - protein, 305 aa, Homo sapiens
MAGQDPALSTSHPFYDVARHGILQVAGDDRFGRRVVTFSCCRMPPSHELDHQRLLDRYKKNLKALYVVHPTSFIKVLWNILKPLISHKFGKKVIYFNYLSELHEHLKYDQLVIPPEVLRYDEKLQSLHEGRTPPPTKTPPPRPPLPTQQFGVSLQYLKDKNQGELIPPVLRFTVTYLREKGLPEHNYVVLRYLMGFLHAVSRESIFNKMNSSNLACVFGLNLIWPSQGVSSLSALVPLNMFTELLIEYYEKIFSTPEAPGEHGLAPWEQGSRAAPLQEAVPRTQATGLTKPTLPPSPLMAARRRL

SEQ ID NO: 30 - DNA, 3257 bp, Homo sapiens
atttccttctccctttccccgccagcttcgcatccatctcccccaccccgtaaccccctcctgcctccatccaccggggctatggccgcagaagaggtattgcagacggtggaccattataagactgagatagagaggctaaccaaggagctcacggagaccacccacgagaagatccaggctgccgagtacgggctggtggtgctggaggagaagctgaccctcaaacagcagtatgatgaactggaggctgagtacgacagcctcaaacaggagctggagcagctcaaagaggcatttgggcagtccttctccatccaccggaaggttgctgaagatggagagactcgggaggaaacgcttctgcaggagtcagcatcgaaggaggcttactatctggggaagatcttggagatgcagaacgagctgaaacagagccgggctgtggtcactaatgtacaggcagaaaacgagaggctcaccgcagtcgtgcaggatctgaaggagaacaatgagatggtggagctacagagaatacggatgaaggatgaaatccgagaatataagttccgggaggcacggctccttcaggactatactgaattggaagaagaaaatatcacattgcagaaactagtgtccacgttgaagcagaaccaggttgaatacgaaggcttaaagcatgagattaagcgatttgaggaggagacggtactgctgaacagccagctggaagatgccatccgattgaaagagattgctgagcaccaactggaagaagccctcgagactttaaaaaatgaaagagagcaaaagaacaacctgcggaaggagctctcccagtatatcagcctcaatgataaccatatcagcatctcagtagatggactcaaatttgccgaggatgggagtgaaccaaacaatgatgacaaaatgaacggtcatatccatgggcctcttgtgaaactgaatggagactatcggactcccaccttaaggaaaggagagtctctgaaccctgtctctgacttattcagtgagctgaacatttcagaaatacagaagttgaagcagcagcttatgcaggtagagcgggaaaaggccattcttttggccaacctacaggagtcacagacacagctggaacacaccaagggggcactgacggagcagcatgagcgggtgcaccggctcacagagcacgtcaatgccatgaggggcctgcaaagcagcaaggagctcaaggctgagctggacggggagaagggccgggactcaggggaggaggcccatgactatgaggtggacatcaatggtttagagatccttgaatgcaaatacagggtggcagtaactgaggtgattgatctgaaagctgaaattaaggccttaaaggagaaatataataaatctgtagaaaactacactgatgagaaggccaagtatgagagtaaaatccagatgtatgatgagcaggtgacaagccttgagaagaccaccaaggagagtggtgagaagatggcccacatggagaaggagttgcaaaagatgaccagcatagccaacgaaaatcacagtacccttaatacggcccaggatgagttagtgacattcagtgaggagttagctcagctttaccaccatgtgtgtctatgtaataatgaaactcccaacagggtcatgctggattactataggcagagcagagtcacccgcagtggcagcctgaaagggcccgatgatcccagaggacttttgtccccacgattagccaggcggggtgtgtcatccccggtagaaacaaggacctcatctgaaccagttgcaaaagaaagcacagagcccagcaaagaaccaagtccaactaagacccccacaatctctcctgttattactgccccaccgtcatctccagtattggatacaagtgacatccgcaaagagccaatgaatatctacaaccttaatgccataatccgggaccaaatcaagcatctgcagaaagctgtggaccggtccttgcaactgtctcgtcaaagagcagcagctcgggagctagcccccatgattgataaagacaaggaagccttaatggaagagatcctcaagctaaagtccctgctgagcaccaaacgggagcagatcgccacattgagggcggtgttgaaagccaacaagcagacagctgaggtggcgctagctaatctcaagaacaaatatgaaaatgaaaaagcaatggtgactgaaaccatgacgaagcttagaaatgaactgaaggctttgaaagaagatgctgcaaccttctcatccctgagaacaatgtttgcaacaagatgtgatgaatatgtcacccagttggatgagatgcagagacagttagcagctgcagaggatgagaagaagactctgaacactttgttacgaatggctatccagcaaaaactcgccctgacccagaggctggaggacttagagtttgaccatgagcagtcccgacgcagcaaaggcaaacttggaaagagcaagatcggcagccctaaagtaagtggggaggcatcagtcaccgtgcccaccatagacacttacctcctgcatagtcagggcccacagacacccaacattcgggtcagcagtggcactcagaggaaaagacaattttcaccttccctttgtgatcagagccgtcccaggacttcaggggcttcctacctacagaatttattaagagttccccctgatcccacctccacagaatcatttcttctgaagggccccccttccatgagtgaattcatccaagggcaccggctcagcaaggaaaaaaggttaaccgtggctccaccagattgtcagcagcctgctgcctccgtaccgccacagtgctcacaactagccgggaggcaagactgcccaactgtcagtcctgacacagctctccctgaggagcagccacattccagctcccagtgcgcccctctccactgtctctccaagcctcctcacccctagtcttcatctcctgtggacgaacatctggggtggaagttttgtagccacacacaggatactgcccaagatccagcgggtgttttcttctcggttgttagatgtacaattggattaatgtccatcgttttggaagacgagaaagttgagaagaacacgaagcacagaccctgatgtgataaaacattttgtggtttctctgagtcacagataaacttctgccatcaaatggctacagttcatttaaattt

SEQ ID NO: 31 - protein, 975 aa, Homo sapiens
MAAEEVLQTVDHYKTEIERLTKELTETTHEKIQAAEYGLVVLEEKLTLKQQYDELEAEYDSLKQELEQLKEAFGQSFSIHRKVAEDGETREETLLQESASKEAYYLGKILEMQNELKQSRAVVTNVQAENERLTAVVQDLKENNEMVELQRIRMKDEIREYKFREARLLQDYTELEEENITLQKLVSTLKQNQVEYEGLKHEIKRFEEETVLLNSQLEDAIRLKEIAEHQLEEALETLKNEREQKNNLRKELSQYISLNDNHISISVDGLKFAEDGSEPNNDDKMNGHIHGPLVKLNGDYRTPTLRKGESLNPVSDLFSELNISEIQKLKQQLMQVEREKAILLANLQESQTQLEHTKGALTEQHERVHRLTEHVNAMRGLQSSKELKAELDGEKGRDSGEEAHDYEVDINGLEILECKYRVAVTEVIDLKAEIKALKEKYNKSVENYTDEKAKYESKIQMYDEQVTSLEKTTKESGEKMAHMEKELQKMTSIANENHSTLNTAQDELVTFSEELAQLYHHVCLCNNETPNRVMLDYYRQSRVTRSGSLKGPDDPRGLLSPRLARRGVSSPVETRTSSEPVAKESTEPSKEPSPTKTPTISPVITAPPSSPVLDTSDIRKEPMNIYNLNAIIRDQIKHLQKAVDRSLQLSRQRAAARELAPMIDKDKEALMEEILKLKSLLSTKREQIATLRAVLKANKQTAEVALANLKNKYENEKAMVTETMTKLRNELKALKEDAATFSSLRTMFATRCDEYVTQLDEMQRQLAAAEDEKKTLNTLLRMAIQQKLALTQRLEDLEFDHEQSRRSKGKLGKSKIGSPKVSGEASVTVPTIDTYLLHSQGPQTPNIRVSSGTQRKRQFSPSLCDQSRPRTSGASYLQNLLRVPPDPTSTESFLLKGPPSMSEFIQGHRLSKEKRLTVAPPDCQQPAASVPPQCSQLAGRQDCPTVSPDTALPEEQPHSSSQCAPLHCLSKPPHP

SEQ ID NO: 32 - DNA, 2717 bp, Homo sapiens
cagggtaacgctgtcttgtggacccgcacttcccacccgagacctctcactgagcccgagccgcgcgcgacatgagccacgggaagggaaccgacatgctcccggagatcgccgccgccgtgggcttcctctccagcctcctgaggacccggggctgcgtgagcgagcagaggcttaaggtcttcagcggggcgctccaggaggcactcacagagcactacaaacaccactggtttcccgaaaagccgtccaagggctccggctaccgctgcattcgcatcaaccacaagatggaccccatcatcagcagggtggccagccagatcggactcagccagccccagctgcaccagctgctgcccagcgagctgaccctgtgggtggacccctatgaggtgtcctaccgcattggggaggacggctccatctgcgtcttgtacgaggaggccccactggccgcctcctgtgggctcctcacctgcaagaaccaagtgctgctgggccggagcagcccctccaagaactacgtgatggcagtctccagctaggcccttccgcccccgccctgggcgccgccgtgctcatgctgccgtgacaacaggccaccacatacctcaacctggggaactgtatttttaaatgaagagctatttatatatattatttttttttaagaaaggaggaaaagaaaccaaaagttttttttaagaaaaaaaatccttcaagggagctgcttggaagtggcctccccaggtgcctttggagagaactgttgcgtgcttgagtctgtgagccagtgtctgcctataggagggggagctgttagggggtagacctagccaaggagaagtgggagacgtttggctagcaccccaggaagatgtgagagggagcaagcaaggttagcaactgtgaacagagaggtcgggatttgccctgggggaggaagagaggccaagttcagagctctctgtctcccccagccagacacctgcatccctggctcctctattactcaggggcattcatgcctggacttaaacaatactatgttatcttttcttttatttttctaatgaggtcctgggcagagagtgaaaaggcctctcctgattcctactgtcctaagctgcttttcttgaaatcatgacttgtttctaattctaccctcaggggcctgtagatgttgctttccagccaggaatctaaagctttgggttttctgagggggggaggagggaactggaggttattggggttaggatggaagggaactctgcacaaaacctttgctttgctagtgctgctttgtgtgtatgtgtggcaaataatttgggggtgatttgcaatgaaattttgggacccaaagagtatccactggggatgttttttggccaaaactcttccttttggaaccacatgaaagtcttgatgctgctgccatgatccctttgagaggtggctcaaaagctacagggaactccaggtcctttattactgccttcttttcaaaagcacaactctcctctaaccctcccctcccccttcccttctggtcgggtcatagagctaccgtattttctaggacaagagttctcagtcactgtgcaatatgccccctgggtcccaggagggtctggaggaaaactggctatcagaacctcctgatgccctggtgggcttagggaaccatctctcctgctctccttgggatgatggctggctagtcagccttgcatgtattccttggctgaatgggagagtgccccatgttctgcaagactacttggtattcttgtagggccgacactaaataaaagccaaaccttgggcactgttttttctccctggtgctcagagcacctgtgggaaaggttgctgtctgtctcagtacaatccaaatttgtcgtagacttgtgcaatatatactgttgtgggttggagaaaagtggaaagctacactgggaagaaactcccttccttcaatttctcagtgacattgatgaggggtcctcaaaagacctcgagtttcccaaaccgaatcaccttaagaaggacagggctagggcatttggccaggatggccaccctcctgctgttgccccttagtgaggaatcttcaccccacttcctctacccccaggttctcctccccacagccagtcccctttcctggatttctaaactgctcaattttgactcaaaggtgctatttaccaaacactctccctacccattcctgccagctctgcctccttttcaactctccacattttgtattgccttcccagacctgcttccagtctttattgctttaaagttcactttgggcccacagacccaagagctaattttctggtttgtgggttgaaacaaagctgtgaatcactgcaggctgtgttcttgcatcttgtctgcaaacaggtccctgcctttttagaagcagcctcatggtctcatgcttaatcttgtctctcttctcttctttatgatgttcactttaaaaacaacaaaacccctgagctggactgttgagcaggcctgtctctcctattaagtaaaaataaatagtagtagtatgtttgtaagctattctgacagaaaagacaaaggttactaattgtatgatagtgtttttatatggaagaatgtacagcttatggacaaatgtacacctttttgttactttaataaaaatgtagtaggataaaaaaaaa

SEQ ID NO: 33 - protein, 158 aa, Homo sapiens
MSHGKGTDMLPEIAAAVGFLSSLLRTRGCVSEQRLKVFSGALQEALTEHYKHHWFPEKPSKGSGYRCIRINHKMDPIISRVASQIGLSQPQLHQLLPSELTLWVDPYEVSYRIGEDGSICVLYEEAPLAASCGLLTCKNQVLLGRSSPSKNYVMAVSS

SEQ ID NO: 34 - DNA, 5471 bp, Homo sapiens
acagcttgcaacactcggcatcttttctggaggcgcctccttcagcagccgcagatggcatccggctgcgggctcggggctcgcaattgattctcccccttgcccacctcgagtccacggacgcacctctcccttcccctcctcccttcgcgcttctgggtctgagcccagctcgcgaccgccgggcagaggatcagtcgcggcggccgaggctgagcagcagcgctctcgctccctgacctggggagaagcgcccacccgggagagctgatccccggctgcctccagcgccccccaccttttgcactccaagccgggggctccagagaccccgctccccaggcgccactatgctggacccttcgtccagcgaagaagaatcggatgagatcgtggaggaggagagcggcaaggaggtgctcggctcggccccgtccggcgcgcgcctgtctcccagccgtaccagcgagggctcggccggcagcgccgggctggggggcggcggcgccggcgccggagccggggtgggtgcaggcggcggcgggggcagcggcgcgagcagcggcggcggggccggggggctgcaacccagcagccgcgctggcggcggccggccctccagccccagcccgtcggtggtgagcgagaaggagaaggaagagttggagcggctgcagaaagaggaggaggagaggaagaagaggctgcagctgtatgtgttcgtgatgcgctgcatcgcctacccctttaatgccaagcagcccaccgacatggctcgccggcagcagaagatcagcaaacagcagctgcagacagtcaaggaccggtttcaggctttcctcaatggggaaacccagatcatggctgacgaagccttcatgaacgctgtgcagagttactatgaggtgttcctgaagagcgaccgtgtggcccgcatggttcagagtggaggctgttccgccaacgactcccgggaggtcttcaagaagcacattgagaagagagtgcgcagcctgcctgagattgacggcctcagcaaggagactgtgctgagctcctggatggccaaatttgatgccatctaccgtggagaagaggacccgcggaagcagcaggcccggatgacagccagcgcagcctccgagctgattctgagcaaggagcaactctatgagatgttccagaacattcttgggatcaagaagttcgaacatcagctcctttacaatgcctgccagctggacaatccagatgagcaagcagcccagatcagacgagagctggatggacgtctacaaatggcagaccaaatagccagggaacgcaaatttcccaagtttgtatccaaagaaatggaaaacatgtacattgaggagctgaagtcatctgtcaacctgctcatggccaacttggagagcatgccggtatccaaaggcggggagttcaagctccagaaactcaaacgcagccacaatgcttccatcatcgacatgggcgaggagagtgagaaccagctctccaagtcagatgtcgtgctgtctttctcattggaggtggtaattatggaagtccaaggcctcaaatctttggctccaaatcgcatcgtatattgcacaatggaggtggaaggaggagagaaactacagactgatcaggccgaggcttctaaaccaacctggggcacccagggtgacttctccacaacccatgcactgccagctgtgaaggtgaagctgttcacagagagcacaggcgtcctggcgttggaggacaaggagcttgggcgggttattctccatcccaccccgaacagccccaaacagtcagagtggcacaaaatgacagtctccaaaaactgccccgaccaagatctcaaaatcaaacttgctgtccgaatggataagcctcaaaacatgaagcattctgggtatttatgggccatcggtaagaatgtctggaagagatggaagaaaaggttttttgtattggtgcaggtcagtcagtacacgtttgccatgtgcagttatcgggagaagaaagcggagcctcaggaacttctacaattggatggctacactgtggattacaccgacccccagccaggtttggagggtggccgagccttcttcaatgctgtcaaggagggagacaccgtgatatttgccagtgacgatgaacaagaccgcatcctgtgggtccaggccatgtatcgggccacggggcagtcacacaagcctgtgcccccgacccaagtccagaaactcaacgccaagggaggaaatgtacctcagctggatgcccctatctctcaattttacgcagatagagctcaaaaacatggcatggatgaatttatctcttccaacccctgtaactttgaccacgcttccctctttgagatggtacaacgccttactttggatcacagacttaatgattcctattcttgcctgggctggttcagtcctggccaggtgtttgtactagacgagtattgcgcccgaaatggagtccgggggtgtcaccgacatctctgctacctcagagacttgcttgaacgggcagaaaatggcgccatgatcgaccccacccttcttcactacagctttgccttctgtgcatcccatgtccatgggaacaggcctgatggaattggaactgtgactgttgaagaaaaggaacgttttgaagaaatcaaagagaggctccgagttctgctagaaaatcagattacacattttaggtattgctttccatttggtcgacctgaaggtgctttgaaagctactctctcactcttggaaagggttttgatgaaagatattgttaccccagtgccacaagaggaggtaaaaacagttatccgtaaatgtctggaacaggctgcgttagtcaactattctcggctctcagagtatgccaaaatcgaagagaatcaaaaggatgcagaaaatgtaggccggttaatcactcctgccaaaaagcttgaagatacaatacgtcttgctgaactagtcattgaagttcttcagcaaaatgaggagcaccacgcagagccacatgttgataaaggagaagcctttgcgtggtggtcagatttaatggtggagcatgcggagacgttcctgtcactctttgcagtagacatggatgcagccttagaggtgcaacctccagacacatgggacagttttccactatttcagctgctgaatgattttctccgtactgactataatttgtgcaatggaaaatttcacaaacacctgcaagacctgtttgccccacttgttgttagatatgtggatctgatggagtcctcaattgcacaatccattcacaggggctttgagcgggagtcatgggaaccagtcaagagtttaaccagtaacctacccaatgtgaacctacccaatgtgaaccttcccaaagtaccaaatctaccagttaacatccctctaggcatcccacaaatgcctactttttcggcaccgtcatggatggctgctatatatgatgcggataatgggtcaggcacctcagaagatctgttttggaaacttgacgcccttcagaccttcattcgggacctgcactggcctgaagaagagtttggaaagcacctggaacaacggctgaagttgatggcaagtgacatgatcgaatcttgtgtcaaaagaaccaggattgcatttgaagttaagctgcaaaaaaccagtcgatcaacagattttcgagtcccacagtcaatatgcaccatgtttaatgttatggttgatgccaaagctcaatcaacaaaactttgcagcatggaaatgggccaagagcatcaataccattcaaaaatagacgaactaattgaagaaactgttaaagaaatgataacactcttggttgcaaagttcgttactatcttggaaggagtgctggcaaaattatccagatatgacgaagggactttgttttcttcttttctgtcatttaccgtgaaggcagcttccaaatatgtggatgtacctaaacccgggatggacgtggccgacgcctacgtgactttcgtccgccattctcaggatgtcctgcgtgataaggtcaatgaggagatgtacatagaaaggttatttgatcaatggtacaacagctccatgaacgtgatctgcacctggttgacggaccggatggacttacagcttcatatttatcagttgaaaacactaattagggtggtaaagaaaacctacagagatttccgattgcaaggggtcctggactccaccttaaacagcaagacctatgaaacgatccggaaccgtctcactgtggaggaagccacagcatcagtgagtgaaggtgggggactgcagggcatcagcatgaaggacagcgatgaggaagacgaagaagacgattagaccatttggtcctagagtctgctgggacagagtcctgtaatcagtgcatgtccttagtctgttagttaaacccattaggaattttctgtcaactaccatgcccatgagatgtttatcaatacaactgccattttagctatgtggtaccaagattagcaaatgaccttcatatccactgatttcctgatgtccatgtctatatgtttacaagcaatatggagcaccattctttaaatactgttcatggagaatacatagtctaaccactaggcgtgtccctgttatcagcaaagatcaatgatgcttcattcatgtactatgtatgcattggtggtaaatggatgtgagggcaagtacatcaagtacattcactctgtttcacgtatgtggatgccagttaattaaatgagtacgtaaataaattaattaaaacacatagatctgctttgtgtttttatttttattttttgaaaaacaaaaggcaagtctccaacaattaacttttgatgctttctgttcccctaaaaccaaaaaatgaaccccttgtgtcgttgttaacccatcctttcatttactcatataattagccaaaaaaaaaaggatggctacataccaatggattgattctcttaattgccacggcaagggggcgatcctatcatgacttaacatcaagcgcgcagttcaaaactactgtcttctgtcaaagttttctcctcttaaatgttattttgcttttacgtctcaactgtgtatgtaaaaaaaacgaatatttaaattacaaccctagactaaaaatgtgtttataataagatgtggatatttccttcagtagattgtaaccataatttaaattattttgttccacactgttttttatatctgtcatgtacattgcattttgatctgtaactgcacaaccctggggtttgctgcagagctatttctttccatgtaaagtagtggatccatcttgcttttgccttatataaagcctacagttatggaagtgtggaaaactgtggcttctcaataaatattcagatgtcctaagaatat

SEQ ID NO: 35 - protein, 1390 aa, Homo sapiens
PGEKRPPGRADPRLPPAPPTFCTPSRGLQRPRSPGATMLDPSSSEEESDEIVEEESGKEVLGSAPSGARLSPSRTSEGSAGSAGLGGGGAGAGAGVGAGGGGGSGASSGGGAGGLQPSSRAGGGRPSSPSPSVVSEKEKEELERLQKEEEERKKRLQLYVFVMRCIAYPFNAKQPTDMARRQQKISKQQLQTVKDRFQAFLNGETQIMADEAFMNAVQSYYEVFLKSDRVARMVQSGGCSANDSREVFKKHIEKRVRSLPEIDGLSKETVLSSWMAKFDAIYRGEEDPRKQQARMTASAASELILSKEQLYEMFQNILGIKKFEHQLLYNACQLDNPDEQAAQIRRELDGRLQMADQIARERKFPKFVSKEMENMYIEELKSSVNLLMANLESMPVSKGGEFKLQKLKRSHNASIIDMGEESENQLSKSDVVLSFSLEVVIMEVQGLKSLAPNRIVYCTMEVEGGEKLQTDQAEASKPTWGTQGDFSTTHALPAVKVKLFTESTGVLALEDKELGRVILHPTPNSPKQSEWHKMTVSKNCPDQDLKIKLAVRMDKPQNMKHSGYLWAIGKNVWKRWKKRFFVLVQVSQYTFAMCSYREKKAEPQELLQLDGYTVDYTDPQPGLEGGRAFFNAVKEGDTVIFASDDEQDRILWVQAMYRATGQSHKPVPPTQVQKLNAKGGNVPQLDAPISQFYADRAQKHGMDEFISSNPCNFDHASLFEMVQRLTLDHRLNDSYSCLGWFSPGQVFVLDEYCARNGVRGCHRHLCYLRDLLERAENGAMIDPTLLHYSFAFCASHVHGNRPDGIGTVTVEEKERFEEIKERLRVLLENQITHFRYCFPFGRPEGALKATLSLLERVLMKDIVTPVPQEEVKTVIRKCLEQAALVNYSRLSEYAKIEENQKDAENVGRLITPAKKLEDTIRLAELVIEVLQQNEEHHAEPHVDKGEAFAWWSDLMVEHAETFLSLFAVDMDAALEVQPPDTWDSFPLFQLLNDFLRTDYNLCNGKFHKHLQDLFAPLVVRYVDLMESSIAQSIHRGFERESWEPVKSLTSNLPNVNLPNVNLPKVPNLPVNIPLGIPQMPTFSAPSWMAAIYDADNGSGTSEDLFWKLDALQTFIRDLHWPEEEFGKHLEQRLKLMASDMIESCVKRTRIAFEVKLQKTSRSTDFRVPQSICTMFNVMVDAKAQSTKLCSMEMGQEHQYHSKIDELIEETVKEMITLLVAKFVTILEGVLAKLSRYDEGTLFSSFLSFTVKAASKYVDVPKPGMDVADAYVTFVRHSQDVLRDKVNEEMYIERLFDQWYNSSMNVICTWLTDRMDLQLHIYQLKTLIRVVKKTYRDFRLQGVLDSTLNSKTYETIRNRLTVEEATASVSEGGGLQGISMKDSDEEDEEDD

SEQ ID NO: 36 - DNA, 4828 bp, Homo sapiens
agtggcgtcggaactgcaaagcacctgtgagcttgcggaagtcagttcagactccagcccgctccagcccggcccgacccgaccgcacccggcgcctgccctcgctcggcgtccccggccagccatgggcccttggagccgcagcctctcggcgctgctgctgctgctgcaggtctcctcttggctctgccaggagccggagccctgccaccctggctttgacgccgagagctacacgttcacggtgccccggcgccacctggagagaggccgcgtcctgggcagagtgaattttgaagattgcaccggtcgacaaaggacagcctatttttccctcgacacccgattcaaagtgggcacagatggtgtgattacagtcaaaaggcctctacggtttcataacccacagatccatttcttggtctacgcctgggactccacctacagaaagttttccaccaaagtcacgctgaatacagtggggcaccaccaccgccccccgccccatcaggcctccgtttctggaatccaagcagaattgctcacatttcccaactcctctcctggcctcagaagacagaagagagactgggttattcctcccatcagctgcccagaaaatgaaaaaggcccatttcctaaaaacctggttcagatcaaatccaacaaagacaaagaaggcaaggttttctacagcatcactggccaaggagctgacacaccccctgttggtgtctttattattgaaagagaaacaggatggctgaaggtgacagagcctctggatagagaacgcattgccacatacactctcttctctcacgctgtgtcatccaacgggaatgcagttgaggatccaatggagattttgatcacggtaaccgatcagaatgacaacaagcccgaattcacccaggaggtctttaaggggtctgtcatggaaggtgctcttccaggaacctctgtgatggaggtcacagccacagacgcggacgatgatgtgaacacctacaatgccgccatcgcttacaccatcctcagccaagatcctgagctccctgacaaaaatatgttcaccattaacaggaacacaggagtcatcagtgtggtcaccactgggctggaccgagagagtttccctacgtataccctggtggttcaagctgctgaccttcaaggtgaggggttaagcacaacagcaacagctgtgatcacagtcactgacaccaacgataatcctccgatcttcaatcccaccacgtacaagggtcaggtgcctgagaacgaggctaacgtcgtaatcaccacactgaaagtgactgatgctgatgcccccaataccccagcgtgggaggctgtatacaccatattgaatgatgatggtggacaatttgtcgtcaccacaaatccagtgaacaacgatggcattttgaaaacagcaaagggcttggattttgaggccaagcagcagtacattctacacgtagcagtgacgaatgtggtaccttttgaggtctctctcaccacctccacagccaccgtcaccgtggatgtgctggatgtgaatgaagcccccatctttgtgcctcctgaaaagagagtggaagtgtccgaggactttggcgtgggccaggaaatcacatcctacactgcccaggagccagacacatttatggaacagaaaataacatatcggatttggagagacactgccaactggctggagattaatccggacactggtgccatttccactcgggctgagctggacagggaggattttgagcacgtgaagaacagcacgtacacagccctaatcatagctacagacaatggttctccagttgctactggaacagggacacttctgctgatcctgtctgatgtgaatgacaacgcccccataccagaacctcgaactatattcttctgtgagaggaatccaaagcctcaggtcataaacatcattgatgcagaccttcctcccaatacatctcccttcacagcagaactaacacacggggcgagtgccaactggaccattcagtacaacgacccaacccaagaatctatcattttgaagccaaagatggccttagaggtgggtgactacaaaatcaatctcaagctcatggataaccagaataaagaccaagtgaccaccttagaggtcagcgtgtgtgactgtgaaggggccgccggcgtctgtaggaaggcacagcctgtcgaagcaggattgcaaattcctgccattctggggattcttggaggaattcttgctttgctaattctgattctgctgctcttgctgtttcttcggaggagagcggtggtcaaagagcccttactgcccccagaggatgacacccgggacaacgtttattactatgatgaagaaggaggcggagaagaggaccaggactttgacttgagccagctgcacaggggcctggacgctcggcctgaagtgactcgtaacgacgttgcaccaaccctcatgagtgtcccccggtatcttccccgccctgccaatcccgatgaaattggaaattttattgatgaaaatctgaaagcggctgatactgaccccacagccccgccttatgattctctgctcgtgtttgactatgaaggaagcggttccgaagctgctagtctgagctccctgaactcctcagagtcagacaaagaccaggactatgactacttgaacgaatggggcaatcgcttcaagaagctggctgacatgtacggaggcggcgaggacgactaggggactcgagagaggcgggccccagacccatgtgctgggaaatgcagaaatcacgttgctggtggtttttcagctcccttcccttgagatgagtttctggggaaaaaaaagagactggttagtgatgcagttagtatagctttatactctctccactttatagctctaataagtttgtgttagaaaagtttcgacttatttcttaaagcttttttttttttcccatcactctttacatggtggtgatgtccaaaagatacccaaattttaatattccagaagaacaactttagcatcagaaggttcacccagcaccttgcagattttcttaaggaattttgtctcacttttaaaaagaaggggagaagtcagctactctagttctgttgttttgtgtatataattttttaaaaaaaatttgtgtgcttctgctcattactacactggtgtgtccctctgcctttttttttttttttaagacagggtctcattctatcggccaggctggagtgcagtggtgcaatcacagctcactgcagccttgtcctcccaggctcaagctatccttgcacctcagcctcccaagtagctgggaccacaggcatgcaccactacgcatgactaattttttaaatatttgagacggggtctccctgtgttacccaggctggtctcaaactcctgggctcaagtgatcctcccatcttggcctcccagagtattgggattacagacatgagccactgcacctgcccagctccccaactccctgccattttttaagagacagtttcgctccatcgcccaggcctgggatgcagtgatgtgatcatagctcactgtaacctcaaactctggggctcaagcagttctcccaccagcctcctttttatttttttgtacagatggggtcttgctatgttgcccaagctggtcttaaactcctggcctcaagcaatccttctgccttggccccccaaagtgctgggattgtgggcatgagctgctgtgcccagcctccatgttttaatatcaactctcactcctgaattcagttgctttgcccaagataggagttctctgatgcagaaattattgggctcttttagggtaagaagtttgtgtctttgtctggccacatcttgactaggtattgtctactctgaagacctttaatggcttccctctttcatctcctgagtatgtaacttgcaatgggcagctatccagtgacttgttctgagtaagtgtgttcattaatgtttatttagctctgaagcaagagtgatatactccaggacttagaatagtgcctaaagtgctgcagccaaagacagagcggaactatgaaaagtgggcttggagatggcaggagagcttgtcattgagcctggcaatttagcaaactgatgctgaggatgattgaggtgggtctacctcatctctgaaaattctggaaggaatggaggagtctcaacatgtgtttctgacacaagatccgtggtttgtactcaaagcccagaatccccaagtgcctgcttttgatgatgtctacagaaaatgctggctgagctgaacacatttgcccaattccaggtgtgcacagaaaaccgagaatattcaaaattccaaattttttcttaggagcaagaagaaaatgtggccctaaagggggttagttgaggggtagggggtagtgaggatcttgatttggatctctttttatttaaatgtgaatttcaacttttgacaatcaaagaaaagacttttgttgaaatagctttactgtttctcaagtgttttggagaaaaaaatcaaccctgcaatcactttttggaattgtcttgatttttcggcagttcaagctatatcgaatatagttctgtgtagagaatgtcactgtagttttgagtgtatacatgtgtgggtgctgataattgtgtattttctttgggggtggaaaaggaaaacaattcaagctgagaaaagtattctcaaagatgcatttttataaattttattaaacaattttgttaaaccataaaaaaaaaaaaa

SEQ ID NO: 37 - protein, 882 aa, Homo sapiens
MGPWSRSLSALLLLLQVSSWLCQEPEPCHPGFDAESYTFTVPRRHLERGRVLGRVNFEDCTGRQRTAYFSLDTRFKVGTDGVITVKRPLRFHNPQIHFLVYAWDSTYRKFSTKVTLNTVGHHHRPPPHQASVSGIQAELLTFPNSSPGLRRQKRDWVIPPISCPENEKGPFPKNLVQIKSNKDKEGKVFYSITGQGADTPPVGVFIIERETGWLKVTEPLDRERIATYTLFSHAVSSNGNAVEDPMEILITVTDQNDNKPEFTQEVFKGSVMEGALPGTSVMEVTATDADDDVNTYNAAIAYTILSQDPELPDKNMFTINRNTGVISVVTTGLDRESFPTYTLVVQAADLQGEGLSTTATAVITVTDTNDNPPIFNPTTYKGQVPENEANVVITTLKVTDADAPNTPAWEAVYTILNDDGGQFVVTTNPVNNDGILKTAKGLDFEAKQQYILHVAVTNVVPFEVSLTTSTATVTVDVLDVNEAPIFVPPEKRVEVSEDFGVGQEITSYTAQEPDTFMEQKITYRIWRDTANWLEINPDTGAISTRAELDREDFEHVKNSTYTALIIATDNGSPVATGTGTLLLILSDVNDNAPIPEPRTIFFCERNPKPQVINIIDADLPPNTSPFTAELTHGASANWTIQYNDPTQESIILKPKMALEVGDYKINLKLMDNQNKDQVTTLEVSVCDCEGAAGVCRKAQPVEAGLQIPAILGILGGILALLILILLLLLFLRRRAVVKEPLLPPEDDTRDNVYYYDEEGGGEEDQDFDLSQLHRGLDARPEVTRNDVAPTLMSVPRYLPRPANPDEIGNFIDENLKAADTDPTAPPYDSLLVFDYEGSGSEAASLSSLNSSESDKDQDYDYLNEWGNRFKKLADMYGGGEDD

SEQ ID NO: 38 - DNA, 4521 bp, Homo sapiens
acttcattcacttgcaaatcagtgtgtgcccacaagagccagctctcccgagcccgtaaccttcgcatcccaagagctgcagtttcagccgcgacagcaagaacggcagagccggcgaccgcggcggcggcggcggcggaggcaggagcagcctgggcgggtcgcagggtctccgcgggcgcaggaaggcgagcagagatatcctctgagagccaagcaaagaacattaaggaaggaaggaggaatgaggctggatacggtgcagtgaaaaaggcacttccaagagtggggcactcactacgcacagactcgacggtgccatcagcatgagaacttaccgctacttcttgctgctcttttgggtgggccagccctacccaactctctcaactccactatcaaagaggactagtggtttcccagcaaagaaaagggccctggagctctctggaaacagcaaaaatgagctgaaccgttcaaaaaggagctggatgtggaatcagttctttctcctggaggaatacacaggatccgattatcagtatgtgggcaagttacattcagaccaggatagaggagatggatcacttaaatatatcctttcaggagatggagcaggagatctcttcattattaatgaaaacacaggcgacatacaggccaccaagaggctggacagggaagaaaaacccgtttacatccttcgagctcaagctataaacagaaggacagggagacccgtggagcccgagtctgaattcatcatcaagatccatgacatcaatgacaatgaaccaatattcaccaaggaggtttacacagccactgtccctgaaatgtctgatgtcggtacatttgttgtccaagtcactgcgacggatgcagatgatccaacatatgggaacagtgctaaagttgtctacagtattctacagggacagccctatttttcagttgaatcagaaacaggtattatcaagacagctttgctcaacatggatcgagaaaacagggagcagtaccaagtggtgattcaagccaaggatatgggcggccagatgggaggattatctgggaccaccaccgtgaacatcacactgactgatgtcaacgacaaccctccccgattcccccagagtacataccagtttaaaactcctgaatcttctccaccggggacaccaattggcagaatcaaagccagcgacgctgatgtgggagaaaatgctgaaattgagtacagcatcacagacggtgaggggctggatatgtttgatgtcatcaccgaccaggaaacccaggaagggattataactgtcaaaaagctcttggactttgaaaagaagaaagtgtatacccttaaagtggaagcctccaatccttatgttgagccacgatttctctacttggggcctttcaaagattcagccacggttagaattgtggtggaggatgtagatgagccacctgtcttcagcaaactggcctacatcttacaaataagagaagatgctcagataaacaccacaataggctccgtcacagcccaagatccagatgctgccaggaatcctgtcaagtactctgtagatcgacacacagatatggacagaatattcaacattgattctggaaatggttcgatttttacatcgaaacttcttgaccgagaaacactgctatggcacaacattacagtgatagcaacagagatcaataatccaaagcaaagtagtcgagtacctctatatattaaagttctagatgtcaatgacaacgccccagaatttgctgagttctatgaaacttttgtctgtgaaaaagcaaaggcagatcagttgattcagaccctgcatgctgttgacaaggatgacccttatagtggacaccaattttcgttttccttggcccctgaagcagccagtggctcaaactttaccattcaagacaacaaagacaacacggcgggaatcttaactcggaaaaatggctataatagacacgagatgagcacctatctcttgcctgtggtcatttcagacaacgactacccagttcaaagcagcactgggacagtgactgtccgggtctgtgcatgtgaccaccacgggaacatgcaatcctgccatgcggaggcgctcatccaccccacgggactgagcacgggggctctggttgccatccttctgtgcatcgtgatcctactagtgacagtggtgctgtttgcagctctgaggcggcagcgaaaaaaagagcctttgatcatttccaaagaggacatcagagataacattgtcagttacaacgacgaaggtggtggagaggaggacacccaggcttttgatatcggcaccctgaggaatcctgaagccatagaggacaacaaattacgaagggacattgtgcccgaagcccttttcctaccccgacggactccaacagctcgcgacaacaccgatgtcagagatttcattaaccaaaggttaaaggaaaatgacacggaccccactgccccgccatacgactccttggccacttacgcctatgaaggcactggctccgtggcggattccctgagctcgctggagtcagtgaccacggatgcagatcaagactatgattaccttagtgactggggacctcgattcaaaaagcttgcagatatgtatggaggagtggacagtgacaaagactcctaatctgttgcctttttcattttccaatacgacactgaaatatgtgaagtggctatttctttatatttatccactactccgtgaaggcttctctgttctacccgttccaaaagccaatggctgcagtccgtgtggatccaatgttagagacttttttctagtacacttttatgagcttccaaggggcaaatttttattttttagtgcatccagttaaccaagtcagcccaacaggcaggtgccggaggggaggacagggaacagtatttccacttgttctcagggcagcgtgcccgcttccgctgtcctggtgttttactacactccatgtcaggtcagccaactgccctaactgtacatttcacaggctaatgggataaaggactgtgctttaaagataaaaatatcatcatagtaaaagaaatgagggcatatcggctcacaaagagataaactacataggggtgtttatttgtgtcacaaagaatttaaaataacacttgcccatgctatttgttcttcaagaactttctctgccatcaactactattcaaaacctcaaatccacccatatgttaaaattctcattactcttaaggaatagaagcaaattaaacggtaacatccaaaagcaaccacaaacctagtacgacttcattccttccactaactcatagtttgttatatcctagactagacatgcgaaagtttgcctttgtaccatataaagggggagggaaatagctaataatgttaaccaaggaaatatattttaccatacatttaaagttttggccaccacatgtatcacgggtcacttgaaattctttcagctatcagtaggctaatgtcaaaattgtttaaaaattcttgaaagaattttcctgagacaaattttaacttcttgtctatagttgtcagtattattctactatactgtacatgaaagtagcagtgtgaagtacaataattcatattcttcatatccttcttacacgactaagttgaattagtaaagttagattaaataaaacttaaatctcactctaggagttcagtggagaggttagagccagccacacttgaacctaataccctgcccttgacatctggaaacctctacatatttatataacgtgatacatttggataaacaacattgagattatgatgaaaacctacatattccatgtttggaagacccttggaagaggaaaattggattcccttaaacaaaagtgtttaagattgtaattaaaatgatagttgattttcaaaagcattaattttttttcattgtttttaactttgctttcatgaccatcctgccatccttgactttgaactaatgataaagtaatgatctcaaactatgacagaaaagtaatgtaaaatccatccaatctattatttctctaattatgcaattagcctcatagttattatccagaggacccaactgaactgaactaatccttctggcagattcaaatcgtttatttcacacgctgttctaatggcacttatcattagaatcttaccttgtgcagtcatcagaaattccagcgtactataatgaaaacatccttgttttgaaaacctaaaagacaggctctgtatatatatatacttaagaatatgctgacttcacttattagtcttagggatttattttcaattaatattaattttctacaaataattttagtgtcatttccatttggggatattgtcatatcagcacatattttctgtttggaaacacactgttgtttagttaagttttaaataggtgtattacccaagaagtaaagatggaaacgtt

SEQ ID NO: 39 - protein, 790 aa, Homo sapiens
MRTYRYFLLLFWVGQPYPTLSTPLSKRTSGFPAKKRALELSGNSKNELNRSKRSWMWNQFFLLEEYTGSDYQYVGKLHSDQDRGDGSLKYILSGDGAGDLFIINENTGDIQATKRLDREEKPVYILRAQAINRRTGRPVEPESEFIIKIHDINDNEPIFTKEVYTATVPEMSDVGTFVVQVTATDADDPTYGNSAKVVYSILQGQPYFSVESETGIIKTALLNMDRENREQYQVVIQAKDMGGQMGGLSGTTTVNITLTDVNDNPPRFPQSTYQFKTPESSPPGTPIGRIKASDADVGENAEIEYSITDGEGLDMFDVITDQETQEGIITVKKLLDFEKKKVYTLKVEASNPYVEPRFLYLGPFKDSATVRIVVEDVDEPPVFSKLAYILQIREDAQINTTIGSVTAQDPDAARNPVKYSVDRHTDMDRIFNIDSGNGSIFTSKLLDRETLLWHNITVIATEINNPKQSSRVPLYIKVLDVNDNAPEFAEFYETFVCEKAKADQLIQTLHAVDKDDPYSGHQFSFSLAPEAASGSNFTIQDNKDNTAGILTRKNGYNRHEMSTYLLPVVISDNDYPVQSSTGTVTVRVCACDHHGNMQSCHAEALIHPTGLSTGALVAILLCIVILLVTVVLFAALRRQRKKEPLIISKEDIRDNIVSYNDEGGGEEDTQAFDIGTLRNPEAIEDNKLRRDIVPEALFLPRRTPTARDNTDVRDFINQRLKENDTDPTAPPYDSLATYAYEGTGSVADSLSSLESVTTDADQDYDYLSDWGPRFKKLADMYGGVDSDKDS

SEQ ID NO: 40 - DNA, 987 bp, Homo sapiens
cggagagggggagaacagacaacgggcggcggggagcagcatggagccggcggcggggagcagcatggagccttcggctgactggctggccacggccgcggcccggggtcgggtagaggaggtgcgggcgctgctggaggcgggggcgctgcccaacgcaccgaatagttacggtcggaggccgatccaggtcatgatgatgggcagcgcccgagtggcggagctgctgctgctccacggcgcggagcccaactgcgccgaccccgccactctcacccgacccgtgcacgacgctgcccgggagggcttcctggacacgctggtggtgctgcaccgggccggggcgcggctggacgtgcgcgatgcctggggccgtctgcccgtggacctggctgaggagctgggccatcgcgatgtcgcacggtacctgcgcgcggctgcggggggcaccagaggcagtaaccatgcccgcatagatgccgcggaaggtccctcagacatccccgattgaaagaaccagagaggctctgagaaacctcgggaaacttagatcatcagtcaccgaaggtcctacagggccacaactgcccccgccacaacccaccccgctttcgtagttttcatttagaaaatagagcttttaaaaatgtcctgccttttaacgtagatataagccttcccccactaccgtaaatgtccatttatatcattttttatatattcttataaaaatgtaaaaaagaaaaacaccgcttctgccttttcactgtgttggagttttctggagtgagcactcacgccctaagcgcacattcatgtgggcatttcttgcgagcctcgcagcctccggaagctgtcgacttcatgacaagcattttgtgaactagggaagctcaggggggttactggcttctcttgagtcacactgctagcaaatggcagaaccaaagctcaaataaaaataaaataattttcattcattcactc

SEQ ID NO: 41 - protein, 156 aa, Homo sapiens
MEPAAGSSMEPSADWLATAAARGRVEEVRALLEAGALPNAPNSYGRRPIQVMMMGSARVAELLLLHGAEPNCADPATLTRPVHDAAREGFLDTLVVLHRAGARLDVRDAWGRLPVDLAEELGHRDVARYLRAAAGGTRGSNHARIDAAEGPSDIPD

SEQ ID NO: 42 - DNA, 5142 bp, Homo sapiens
gaattcggccgagaggacgagggggagggccagagctgcgcgtgctgctttgcccgagcccgagcccgagcccgagcccgagcccgagcccgagcccgagcccgaacgcaagcctgggagcgcggagcccggctagggactcctcctatttatggagcaggcacccaacatggctgagccccggggccccgtagaccatggagtccagattcgcttcatcacagagccagtgagtggtgcagagatgggcactctacgtcgaggtggacgacgcccagctaaggatgcaagagccagtacctacggggttgctgtgcgtgtgcagggaatcgctgggcagccctttgtggtgctcaacagtggggagaaaggcggtgactcctttggggtccaaatcaagggggccaatgaccaaggggcctcaggagctctgagctcagatttggaactccctgagaacccctactctcaggtcaagggatttcctgccccctcgcagagcagcacatctgatgaggagcctggggcctactggaatggaaagctactccgttcccactcccaggcctcactggcaggccctggcccagtggatcctagtaacagaagcaacagcatgctggagctagccccgaaagtggcttccccaggtagcaccattgacactgctcccctgtcttcagtggactcactcatcaacaagtttgacagtcaacttggaggccaggcccggggtcggactggccgccgaacacggatgctaccccctgaacagcgcaaacggagcaagagcctggacagccgcctcccacgggacacctttgaggaacgggagcgccagtccaccaaccactggacctctagcacaaaatatgacaaccatgtgggcacttcgaagcagccagcccagagccagaacctgagtcctctcagtggctttagccgttctcgtcagactcaggactgggtccttcagagttttgaggagccgcggaggagtgcacaggaccccaccatgctgcagttcaaatcaactccagacctccttcgagaccagcaggaggcagccccaccaggcagtgtggaccatatgaaggccaccatctatggcatcctgagggagggaagctcagaaagtgaaacctctgtgaggaggaaggttagtttggtgctggagaagatgcagcctctagtgatggtttcttctggttctactaaggccgtggcagggcagggtgagcttacccgaaaagtggaggagctacagcgaaagctggatgaagaggtgaagaagcggcagaagctagagccatcccaagttgggctggagcggcagctggaggagaaaacagaagagtgcagccgactgcaggagctgctggagaggaggaagggggaggcccagcagagcaacaaggagctccagaacatgaagcgcctcttggaccagggtgaagatttacgacatgggctggagacccaggtgatggagctgcagaacaagctgaaacatgtccagggtcctgagcctgctaaggaggtgttactgaaggacctgttagagacccgggaacttctggaagaggtcttggaggggaaacagcgagtagaggagcagctgaggctgcgggagcgggagttgacagccctgaagggggccctgaaagaggaggtagcctcccgtgaccaggaggtggaacatgtccggcagcagtaccagcgagacacagagcagctccgcaggagcatgcaagatgcaacccaggaccatgcagtgctggaggccgagaggcagaagatgtcagcccttgtgcgagggctgcagagggagctggaggagacttcagaggagacagggcattggcagagtatgttccagaagaacaaggaggatcttagagccaccaagcaggaactcctgcagctgcgaatggagaaggaggagatggaagaggagcttggagagaagatagaggtcttgcagagggaattagagcaggcccgagctagtgctggagatactcgccaggttgaggtgctcaagaaggagctgctccggacacaggaggagcttaaggaactgcaggcagaacggcagagccaggaggtggctgggcgacaccgggaccgggagttggagaagcagctggcggtcctgagggtcgaggctgatcgaggtcgggagctggaagaacagaacctccagctacaaaagaccctccagcaactgcgacaggactgtgaagaggcttccaaggctaagatggtggccgaggcagaggcaacagtgctggggcagcggcgggccgcagtggagacgacgcttcgggagacccaggaggaaaatgacgaattccgccggcgcatcctgggtttggagcagcagctgaaggagactcgaggtctggtggatggtggggaagcggtggaggcacgactacgggacaagctgcagcggctggaggcagagaaacagcagctggaggaggccctgaatgcgtcccaggaagaggaggggagtctggcagcagccaagcgggcactggaggcacgcctagaggaggctcagcgggggctggcccgcctggggcaggagcagcagacactgaaccgggccctggaggaggaagggaagcagcgggaggtgctccggcgaggcaaggctgagctggaggagcagaagcgtttgctggacaggactgtggaccgactgaacaaggagttggagaagatcggggaggactctaagcaagccctgcagcagctccaggcccagctggaggattataaggaaaaggcccggcgggaggtggcagatgcccagcgccaggccaaggattgggccagtgaggctgagaagacctctggaggactgagccgacttcaggatgagatccagaggctgcggcaggccctgcaggcatcccaggctgagcgggacacagcccggctggacaaagagctactggcccagcgactgcaggggctggagcaagaggcagagaacaagaagcgttcccaggacgacagggcccggcagctgaagggtctcgaggaaaaagtctcacggctggaaacagagttagatgaggagaagaacaccgtggagctgctaacagatcgggtgaatcgtggccgggaccaggtggatcagctgaggacagagctcatgcaggaaaggtctgctcggcaggacctggagtgtgacaaaatctccttggagagacagaacaaggacctgaagacccggttggccagctcagaaggcttccagaagcctagtgccagcctctctcagcttgagtcccagaatcagttgttgcaggagcggctacaggctgaagagagggagaagacagttctgcagtctaccaatcgaaaactggagcggaaagttaaagaactatccatccagattgaagacgagcggcagcatgtcaatgaccagaaagaccagctaagcctgagggtgaaggctttgaagcgtcaggtggatgaagcagaagaggaaattgagcgactggacggcctgaggaagaaggcccagcgtgaggtggaggagcagcatgaggtcaatgaacagctccaggcccggatcaagtctctggagaaggactcctggcgcaaagcttcccgctcagctgctgagtcagctctcaaaaacgaagggctgagctcagatgaggaattcgacagtgtctacgatccctcgtccattgcatcactgcttacggagagcaacctacagaccagctcctgttagctcgtggtcctcaaggactcagaaaccaggctcgaggcctatcccagcaagtgctgctctgctctgcccaccctgggttctgcattcctatgggtgacccaattattcagacctaagacagggaggggtcagagtgatggtgataaaaaaaaaaaaatcatcagcaataagctgatagatggactttccactgtaggagtggacgtttcaagccaactgagccttttcctcaagtgccgacacctccctcatctctcttatagtggaaggatggtcagcattaggctgatggggactgagaaggataggaagggatagaaattgccatgtgtataaagctttattctttagcccttaaccctaaggctcagggaaataccctatgttattgtgctccctggattcctgcaactcattttccttccactctggagcagggtgaggggaatgttatgggtaacagacatgcaggcatggctctacccatttctttgcacaagtatggggcccatgtggtagtccccatacccctccagttcctatatttttgtcttcttcctttcccctctttgccattcctaccttgcatttttcctgtcagtgccttagccaaggcaaggagataaggatgctcttcttgctttttatatctgcacattcatacctctccaaagaccagcttttccccagccagggccctcagccttccctgctgccccagtgattgattgagagagctgttggggtttctctgccaatgacccctgggagagggactttggtagggtcatgataaagtggcgggggtcttggtcctgctcagggttttcatccttcctcctctccctcctctgtgactgtggatatggttataaggtggttgcacctgggagccctgacaactggctgcacaaattccaaaagtaaaggtgtcagtccctgtggccttccttggggcttctctgaccacatgtgcccaacttcaataagagaaccaagggaccttcattttctgaggtgcttggctctgattcagggctttgcaaggggttagaagctgactgtaaaaatgggaagaggcaacggaagacatttatttctcctttggattttggggagaaccaagccctggtagggaagaggtaagggggatgattcacctccatatttcctaagcaggttgtatagggagccggtggcaggaggaaggctgttttcacaaatgacttgtaatgtcgtgattaaaaaaattcctatattcttctgcaaatcaaacgttctttcccaatccaatccagccttggttttattttaaattaaatattaaaattacacatttatattgaaaaaaaaaaaaaaaaaaaaaaaaaaaaaaaaaa

SEQ ID NO: 43 - protein, 1203 aa, Homo sapiens
MEQAPNMAEPRGPVDHGVQIRFITEPVSGAEMGTLRRGGRRPAKDARASTYGVAVRVQGIAGQPFVVLNSGEKGGDSFGVQIKGANDQGASGALSSDLELPENPYSQVKGFPAPSQSSTSDEEPGAYWNGKLLRSHSQASLAGPGPVDPSNRSNSMLELAPKVASPGSTIDTAPLSSVDSLINKFDSQLGGQARGRTGRRTRMLPPEQRKRSKSLDSRLPRDTFEERERQSTNHWTSSTKYDNHVGTSKQPAQSQNLSPLSGFSRSRQTQDWVLQSFEEPRRSAQDPTMLQFKSTPDLLRDQQEAAPPGSVDHMKATIYGILREGSSESETSVRRKVSLVLEKMQPLVMVSSGSTKAVAGQGELTRKVEELQRKLDEEVKKRQKLEPSQVGLERQLEEKTEECSRLQELLERRKGEAQQSNKELQNMKRLLDQGEDLRHGLETQVMELQNKLKHVQGPEPAKEVLLKDLLETRELLEEVLEGKQRVEEQLRLRERELTALKGALKEEVASRDQEVEHVRQQYQRDTEQLRRSMQDATQDHAVLEAERQKMSALVRGLQRELEETSEETGHWQSMFQKNKEDLRATKQELLQLRMEKEEMEEELGEKIEVLQRELEQARASAGDTRQVEVLKKELLRTQEELKELQAERQSQEVAGRHRDRELEKQLAVLRVEADRGRELEEQNLQLQKTLQQLRQDCEEASKAKMVAEAEATVLGQRRAAVETTLRETQEENDEFRRRILGLEQQLKETRGLVDGGEAVEARLRDKLQRLEAEKQQLEEALNASQEEEGSLAAAKRALEARLEEAQRGLARLGQEQQTLNRALEEEGKQREVLRRGKAELEEQKRLLDRTVDRLNKELEKIGEDSKQALQQLQAQLEDYKEKARREVADAQRQAKDWASEAEKTSGGLSRLQDEIQRLRQALQASQAERDTARLDKELLAQRLQGLEQEAENKKRSQDDRARQLKGLEEKVSRLETELDEEKNTVELLTDRVNRGRDQVDQLRTELMQERSARQDLECDKISLERQNKDLKTRLASSEGFQKPSASLSQLESQNQLLQERLQAEEREKTVLQSTNRKLERKVKELSIQIEDERQHVNDQKDQLSLRVKALKRQVDEAEEEIERLDGLRKKAQREVEEQHEVNEQLQARIKSLEKDSWRKASRSAAESALKNEGLSSDEEFDSVYDPSSIASLLTESNLQTSSC

SEQ ID NO: 44 - DNA, 1925 bp, Homo sapiens
agtggagtgggacaggtatataaaggaagtacagggcctggggaagaggccctgtctaggtagctggcaccaggagccgtgggcaagggaagaggccacaccctgccctgctctgctgcagccagaatgggtgtgaaggcgtctcaaacaggctttgtggtcctggtgctgctccagtgctgctctgcatacaaactggtctgctactacaccagctggtcccagtaccgggaaggcgatgggagctgcttcccagatgcccttgaccgcttcctctgtacccacatcatctacagctttgccaatataagcaacgatcacatcgacacctgggagtggaatgatgtgacgctctacggcatgctcaacacactcaagaacaggaaccccaacctgaagactctcttgtctgtcggaggatggaactttgggtctcaaagattttccaagatagcctccaacacccagagtcgccggactttcatcaagtcagtaccgccattcctgcgcacccatggctttgatgggctggaccttgcctggctctaccctggacggagagacaaacagcattttaccaccctaatcaaggaaatgaaggccgaatttataaaggaagcccagccagggaaaaagcagctcctgctcagcgcagcactgtctgcggggaaggtcaccattgacagcagctatgacattgccaagatatcccaacacctggatttcattagcatcatgacctacgattttcatggagcctggcgtgggaccacaggccatcacagtcccctgttccgaggtcaggaggatgcaagtcctgacagattcagcaacactgactatgctgtggggtacatgttgaggctgggggctcctgccagtaagctggtgatgggcatccccaccttcgggaggagcttcactctggcttcttctgagactggtgttggagccccaatctcaggaccgggaattccaggccggttcaccaaggaggcagggacccttgcctactatgagatctgtgacttcctccgcggagccacagtccatagaaccctcggccagcaggtcccctatgccaccaagggcaaccagtgggtaggatacgacgaccaggaaagcgtcaaaagcaaggtgcagtacctgaaggataggcagctggcaggcgccatggtatgggccctggacctggatgacttccagggctccttctgcggccaggatctgcgcttccctctcaccaatgccatcaaggatgcactcgctgcaacgtagccctctgttctgcacacagcacgggggccaaggatgccccgtccccctctggctccagctggccgggagcctgatcacctgccctgctgagtcccaggctgagcctcagtctccctcccttggggcctatgcagaggtccacaacacacagatttgagctcagccctggtgggcagagaggtagggatggggctgtggggatagtgaggcatcgcaatgtaagactcgggattagtacacacttgttgatgattaatggaaatgtttacagatccccaagcctggcaagggaatttcttcaactccctgccccctagccctccttatcaaaggacaccattttggcaagctctatcaccaaggagccaaacatcctacaagacacagtgaccatactaattataccccctgcaaagccagcttgaaaccttcacttaggaacgtaatcgtgtcccctatcctacttccccttcctaattccacagctgctcaataaagtacaagagtttaacagtgtgttggcgctttgctttggtctatctttgagcgcccactagacccactggactcacctcccccatctcttctgggttccttcctctgagccttgggacccctgagcttgcagagatgaaggccgccatgtt

SEQ ID NO: 45 - protein, 383 aa, Homo sapiens
MGVKASQTGFVVLVLLQCCSAYKLVCYYTSWSQYREGDGSCFPDALDRFLCTHIIYSFANISNDHIDTWEWNDVTLYGMLNTLKNRNPNLKTLLSVGGWNFGSQRFSKIASNTQSRRTFIKSVPPFLRTHGFDGLDLAWLYPGRRDKQHFTTLIKEMKAEFIKEAQPGKKQLLLSAALSAGKVTIDSSYDIAKISQHLDFISIMTYDFHGAWRGTTGHHSPLFRGQEDASPDRFSNTDYAVGYMLRLGAPASKLVMGIPTFGRSFTLASSETGVGAPISGPGIPGRFTKEAGTLAYYEICDFLRGATVHRTLGQQVPYATKGNQWVGYDDQESVKSKVQYLKDRQLAGAMVWALDLDDFQGSFCGQDLRFPLTNAIKDALAAT

SEQ ID NO: 46 - DNA, 1528 bp, Homo sapiens
ccggctcccattccggctccagcctccaatccgacccccatttcggctgcagcctcggacctagctccggccctcggtctatccggttgcatcctccctccctgttccggatcttatcttgcgccagcgcctactccaggatcccgtagccagacctcaagccatggctggtcccttctcccgtctgctgtccgcccgcccgggactcaggctcctggctttggccggagcggggtctctagccgctgggtttctgctccgaccggaacctgtacgagctgccagtgaacgacggaggctgtatcccccgagcgctgagtacccagacctccgaaagcacaacaactgcatggccagtcacctgaccccagcagtctatgcacggctctgcgacaagaccacacccactggttggacgctagatcagtgtatccagactggcgtggacaaccctggccaccccttcatcaagactgtgggcatggtggctggagatgaggagacctatgaggtatttgctgacctgtttgaccctgtgatccaagagcgacacaatggatatgacccccggacaatgaagcacaccacggatctagatgccagtaaaatccgttctggctactttgatgagaggtatgtattgtcctctagagtcagaactggccgaagcatccgaggactcagtctgcctccagcttgcactcgagcagagcgacgagaggtggaacgtgttgtggtggatgcactgagtggcctgaagggtgacctggctggacgttactataggctcagtgagatgacagaggctgaacagcagcagcttattgatgaccactttctgtttgataagcctgtgtccccgttgctgactgcagcaggaatggctcgagactggccagatgctcgtggaatttggcacaacaatgagaagagcttcctgatctgggtgaatgaggaggatcatacacgggtgatctccatggagaagggtggtaacatgaagagagtgtttgaaagattctgccgaggcctcaaagaggtggagagacttatccaagaacgtggctgggagttcatgtggaatgagcgtttgggatacatcttgacctgtccatctaacctgggcactggacttcgggcaggagtgcacatcaaactgcccctgctaagcaaagatagccgcttcccaaagatcctggagaacctaagactccaaaaacgtggtactggaggagtggacactgctgctacaggcggtgtctttgatatttctaatttggaccgactaggcaaatcagaggtggagctggtgcaactggtcatcgatggagtaaactatttgattgattgtgaacggcgtctggagagaggccaggatatccgcatccccacacctgtcatccacaccaagcattaactccccatcgccagctgatgactcaagattcccaggagttttgctcattctaatgatggcccattctacttgctctggacctgcccccgcatcccctgcctccatcctagt

SEQ ID NO: 47 - protein, 417 aa, Homo sapiens
MAGPFSRLLSARPGLRLLALAGAGSLAAGFLLRPEPVRAASERRRLYPPSAEYPDLRKHNNCMASHLTPAVYARLCDKTTPTGWTLDQCIQTGVDNPGHPFIKTVGMVAGDEETYEVFADLFDPVIQERHNGYDPRTMKHTTDLDASKIRSGYFDERYVLSSRVRTGRSIRGLSLPPACTRAERREVERVVVDALSGLKGDLAGRYYRLSEMTEAEQQQLIDDHFLFDKPVSPLLTAAGMARDWPDARGIWHNNEKSFLIWVNEEDHTRVISMEKGGNMKRVFERFCRGLKEVERLIQERGWEFMWNERLGYILTCPSNLGTGLRAGVHIKLPLLSKDSRFPKILENLRLQKRGTGGVDTAATGGVFDISNLDRLGKSEVELVQLVIDGVNYLIDCERRLERGQDIRIPTPVIHTKH

SEQ ID NO: 48 - DNA, 2365 bp, Homo sapiens
ggagccggagagcgagcgcggctgcagccggcggcatggctagcacggcttcggagatcatcgccttcatggtctccatctcaggctgggtactggtgtcctccacgctgcccaccgactactggaaggtgtctaccatcgacggcacggtcatcacaaccgccacctattgggccaacctgtggaaggcgtgcgttaccgactccacgggcgtctccaactgcaaggacttcccctccatgctggcgctggacggttatatacaggcatgtagaggacttatgatcgctgctgtcagcctgggcttctttggttccatatttgcgctctttggaatgaagtgtaccaaagtcggaggctccgataaagccaaagctaaaattgcttgtttggctgggattgtattcatactgtcagggctgtgctcaatgactggatgttccctatatgcaaacaaaatcacaacggaattctttgatcctctctttgttgagcaaaagtatgaattaggagccgctctgtttattggatgggcaggagcctcactgtgcataattggtggtgtcatattttgcttttcaatatctgacaacaacaaaacacccagatacacatacaacggggccacatctgtcatgtcttctcggacaaagtatcatggtggagaagattttaaaacaacaaacccttcaaaacagtttgataaaaatgcttatgtctaaaagagctcgctggcaagctgcctcttgagtttgttataaaagcgaactgttcacaaaatgatcccatcaaggccctcccataattaacactcaaaactatttttaaaatatgcatttgaagcatctgttgattgtatggatgtaagtgttcttacatagttagttatatactaatcattttctgttgtggctttctataaaaaataaacagtttatttacaggatttgtaaaatgttttctacatttatatagaacatgaaaagcatttagtaccaaaggttcaagaagtattcgtactctagcctttttaatcattcatagatagaagtctttgtacccactccttatgtttcttttcattcataaacaggtgtataaggaacaatgtcttataaacagcatgggggcaatctgagaatattcctcaaaaggtgtccaggttaaatagacatgttactggctgcacacaggcaaattctagtttgttttttttaagtattctacaacatttatttaaaaaggtaaatctttttgttgaagcagcaagttatctggtagaacttaacttctacaggatcagagaggatcttgctcattcatggccatatccacatgcccatggccactcagtagattgttgaaaaagcaaagccacaccattctctttgatgtatgcagagagttacgtagcaggggatgttctctgatttattccactggcaccattagtgaatatttagttgttttcataaacgatgctgtgatgaagactcatgtacatatttagcaaattttggtttcttacatgtgcctgtcatgactgtaattcattatgactgctccaggaagggctaatggggccaatatattattgcctgtcatgtggcacatccatgttaaggggctgaggcgtccctggcacggaatgcagagccctgagctagggcatcagcagaagctgagatagagatattggtcatggttgactgaggagccaattaaaacctgtttatgcctagtgttccattattggaacactaagcatgtgggagttatttatatcctactgctcaaggtcatcgccaaggtgtgattggaaaaattcaaaaaattgcaacctcaggcataaatgggttaaggacatcccaagcccaagtggtacgtgcctcactcagaactgacgggccgagttctatctaggtgtgtcttccagaacctgtttacggctaactggataactgagagacttgtcatttctaaagacatttaagttgctccagggatttctgaaaaaagacacaggcttcttcctagagccagccctatataacatgcccacaagggcaacagttatcacagttcatacacacctttcatgtcctgtctcactcactcctcacagccatcctaggagatacatattgttttcatcctgcatttacagaaaaagaaatgaaaacagagagcttaaataatttgccacagtaatgtcgaaactaggcctttgaaccaaggcagtctagggtaaaatatagtttcaaagtatgaataagaattggtatttgtgttatctttgagtaagaaactgtccgatatgaatcacaacgtgggtgaatgtagtattttcctgaagtgtgaaaga

SEQ ID NO: 49 - protein, 228 aa, Homo sapiens
MASTASEIIAFMVSISGWVLVSSTLPTDYWKVSTIDGTVITTATYWANLWKACVTDSTGVSNCKDFPSMLALDGYIQACRGLMIAAVSLGFFGSIFALFGMKCTKVGGSDKAKAKIACLAGIVFILSGLCSMTGCSLYANKITTEFFDPLFVEQKYELGAALFIGWAGASLCIIGGVIFCFSISDNNKTPRYTYNGATSVMSSRTKYHGGEDFKTTNPSKQFDKNAYV

SEQ ID NO: 50 - DNA, 1024 bp, Homo sapiens
ccccacccgaaacacactcagcccttgcactgacctgccttctgattggaggctggttgcttcggataatgacctccaggaccccactgttggttacagcctgtttgtattattcttactgcaactcaagacacctgcagcagggcgtgagaaaaagtaaaagaccagtattttcacattgccaggtaccagaaacacagaagactgacacccgccacttaagtggggccagggctggtgtctgcccatgttgccatcctgatgggctgcttgccacaatgagggatcttcttcaatacatcgcttgcttctttgcctttttctctgctgggtttttgattgtggccacctggactgactgttggatggtgaatgctgatgactctctggaggtgagcacaaaatgccgaggcctctggtgggaatgcgtcacaaatgcttttgatgggattcgcacctgtgatgagtacgattccatacttgcggagcatcccttgaagctggtggtaactcgagcgttgatgattactgcagatattctagctgggtttggatttctcaccctgctccttggtcttgactgcgtgaaattcctccctgatgagccgtacattaaagtccgcatctgctttgttgctggagccacgttactaatagcaggtaccccaggaatcattggctctgtgtggtatgctgttgatgtgtatgtggaacgttctactttggttttgcacaatatatttcttggtatccaatataaatttggttggtcctgttggctcggaatggctgggtctctgggttgctttttggctggagctgttctcacctgctgcttatatctttttaaagatgttggacctgagagaaactatccttattccttgaggaaagcctattcagccgcgggtgtttccatggccaagtcatactcagcccctcgcacagagacggccaaaatgtatgctgtagacacaagggtgtaaaatgcacgtttcagggtgtgtttgcatatgatttaatc

SEQ ID NO: 51 - protein, 305 aa, Homo sapiens
MTSRTPLLVTACLYYSYCNSRHLQQGVRKSKRPVFSHCQVPETQKTDTRHLSGARAGVCPCCHPDGLLATMRDLLQYIACFFAFFSAGFLIVATWTDCWMVNADDSLEVSTKCRGLWWECVTNAFDGIRTCDEYDSILAEHPLKLVVTRALMITADILAGFGFLTLLLGLDCVKFLPDEPYIKVRICFVAGATLLIAGTPGIIGSVWYAVDVYVERSTLVLHNIFLGIQYKFGWSCWLGMAGSLGCFLAGAVLTCCLYLFKDVGPERNYPYSLRKAYSAAGVSMAKSYSAPRTETAKMYAVDTRV

SEQ ID NO: 52 - DNA, 1665 bp, Homo sapiens
gaaggaactggttctgctcacacttgctggcttgcgcatcaggactggctttatctcctgactcacggtgcaaaggtgcactctgcgaacgttaagtccgtccccagcgcttggaatcctacggcccccacagccggatcccctcagccttccaggtcctcaactcccgtggacgctgaacaatggcctccatggggctacaggtaatgggcatcgcgctggccgtcctgggctggctggccgtcatgctgtgctgcgcgctgcccatgtggcgcgtgacggccttcatcggcagcaacattgtcacctcgcagaccatctgggagggcctatggatgaactgcgtggtgcagagcaccggccagatgcagtgcaaggtgtacgactcgctgctggcactgccgcaggacctgcaggcggcccgcgccctcgtcatcatcagcatcatcgtggctgctctgggcgtgctgctgtccgtggtggggggcaagtgtaccaactgcctggaggatgaaagcgccaaggccaagaccatgatcgtggcgggcgtggtgttcctgttggccggccttatggtgatagtgccggtgtcctggacggcccacaacatcatccaagacttctacaatccgctggtggcctccgggcagaagcgggagatgggtgcctcgctctacgtcggctgggccgcctccggcctgctgctccttggcggggggctgctttgctgcaactgtccaccccgcacagacaagccttactccgccaagtattctgctgcccgctctgctgctgccagcaactacgtgtaaggtgccacggctccactctgttcctctctgctttgttcttccctggactgagctcagcgcaggctgtgaccccaggagggccctgccacgggccactggctgctggggactggggactgggcagagactgagccaggcaggaaggcagcagccttcagcctctctggcccactcggacaacttcccaaggccgcctcctgctagcaagaacagagtccaccctcctctggatattggggagggacggaagtgacagggtgtggtggtggagtggggagctggcttctgctggccaggatagcttaaccctgactttgggatctgcctgcatcggcgttggccactgtccccatttacattttccccactctgtctgcctgcatctcctctgttccgggtaggccttgatatcacctctgggactgtgccttgctcaccgaaacccgcgcccaggagtatggctgaggccttgcccacccacctgcctgggaagtgcagagtggatggacgggtttagaggggaggggcgaaggtgctgtaaacaggtttgggcagtggtgggggagggggccagagaggcggctcaggttgcccagctctgtggcctcaggactctctgcctcacccgcttcagcccagggcccctggagactgatcccctctgagtcctctgccccttccaaggacactaatgagcctgggagggtggcagggaggaggggacagcttcacccttggaagtcctggggtttttcctcttccttctttgtggtttctgttttgtaatttaagaagagctattcatcactgtaattattattattttctacaataaatgggacctgtgcacagg

SEQ ID NO: 53 - protein, 209 aa, Homo sapiens
MASMGLQVMGIALAVLGWLAVMLCCALPMWRVTAFIGSNIVTSQTIWEGLWMNCVVQSTGQMQCKVYDSLLALPQDLQAARALVIISIIVAALGVLLSVVGGKCTNCLEDESAKAKTMIVAGVVFLLAGLMVIVPVSWTAHNIIQDFYNPLVASGQKREMGASLYVGWAASGLLLLGGGLLCCNCPPRTDKPYSAKYSAARSAAASNYV

SEQ ID NO: 54 - DNA, 3457 bp, Homo sapiens
  misc_feature (1)...(3457): n = A,T,C or G
atgaagattttgatacttggtatttttctgtttttatgtagtaccccagcctgggcgaaagaaaagcattattacattggaattattgaaacgacttgggattatgcctctgaccatggggaaaagaaacttatttctgttgacacggaacattccaatatctatcttcaaaatggcccagatagaattgggagactatataagaaggccctttatcttcagtacacagatgaaacctttaggacaactatagaaaaaccggtctggcttgggtttttaggccctattatcaaagctgaaactggagataaagtttatgtacacttaaaaaaccttgcctctaggccctacacctttcattcacatggaataacttactataaggaacatgagggggccatctaccctgataacaccacagattttcaaagagcagatgacaaagtatatccaggagagcagtatacatacatgttgcttgccactgaagaacaaagtcctggggaaggagatggcaattgtgtgactaggatttaccattcccacattgatgctccaaaagatattgcctcaggactcatcggacctttaataatctgtaaaaaagattctctagataaagaaaaagaaaaacatattgaccgagaatttgtggtgatgttttctgtggtggatgaaaatttcagctggtacctagaagacaacattaaaacctactgctcagaaccagagaaagttgacaaagacaacgaagacttccaggagagtaacagaatgtattctgtgaatggatacacttttggaagtctcccaggactctccatgtgtgctgaagacagagtaaaatggtacctttttggtatgggtaatgaagttgatgtgcacgcagctttctttcacgggcaagcactgactaacaagaactaccgtattgacacaatcaacctctttcctgctaccctgtttgatgcttatatggtggcccagaaccctggagaatggatgctcagctgtcagaatctaaaccatctgaaagccggtttgcaagcctttttccaggtccaggagtgtaacaagtcttcatcaaaggataatatccgtgggaagcatgttagacactactacattgccgctgaggaaatcatctggaactatgctccctctggtatagacatcttcactaaagaaaacttaacagcacctggaagtgactcagcggtgttttttgaacaaggtaccacaagaattggaggctcttataaaaagctggtttatcgtgagtacacagatgcctccttcacaaatcgaaaggagagaggccctgaagaagagcatcttggcatcctgggtcctgtcatttgggcagaggtgggagacaccatcagagtaaccttccataacaaaggagcatatcccctcagtattgagccgattggggtgagattcaataagaacaacgagggcacatactattccccaaattacaacccccagagcagaagtgtgcctccttcagcctcccatgtggcacccacagaaacattcacctatgaatggactgtccccaaagaagtaggacccactaatgcagatcctgtgtgtctagctaagatgtattattctgctgtggatcccactaaagatatattcactgggcttattgggccaatgaaaatatgcaagaaaggaagtttacatgcaaatgggagacagaaagatgtagacaaggaattctatttgtttcctacagtatttgatgagaatgagagtttactcctggaagataatattagaatgtttacaactgcacctgatcaggtggataaggaagatgaagactttcaggaatctaataaaatgcactccatgaatggattcatgtatgggaatcagccgggtctcactatgtgcaaaggagattcggtcgtgtggtacttattcagcgccggaaatgaggccgatgtacatggaatatacttttcaggaaacacatatctgtggagaggagaacggagagacacagcaaacctcttccctcaaacaagtcttacgctccacatgtggcctgacacagaggggacttttaatgttgaatgccttacaactgatcattacacaggcggcatgaagcaaaaatatactgtgaaccaatgcaggcggcagtctgaggattccaccttctacctgggagagaggacatactatatcgcagcagtggaggtggaatgggattattccccacaaagggagtgggaaaaggagctgcatcatttacaagagcagaatgtttcaaatgcatttttagataagggagagttttacataggctcaaagtacaagaaagttgtgtatcggcagtatactgatagcacattccgtgttccagtggagagaaaagctgaagaagaacatctgggaattctaggtccacaacttcatgcagatgttggagacaaagtcaaaattatctttaaaaacatggccacaaggccctactcaatacatgcccatggggtacaaacagagagttctacagttactccaacattaccaggtgaaactctcacttacgtatggaaaatcccagaaagatctggagctggaacagaggattctgcttgtattccatgggcttattattcaactgtggatcaagttaaggacctctacagtggattaattggccccctgattgtttgtcgaagaccttacttgaaagtattcaatcccagaaggaagctggaatttgcccttctgtttctagtttttgatgagaatgaatcttggtacttagatgacaacatcaaaacatactctgatcaccccgagaaagtaaacaaagatgatgaggaattcatagaaagcaataaaatgcatgctattaatggaagaatgtttggaaacctacaaggcctcacaatgcacgtgggagatgaagtcaactggtatctgatgggaatgggcaatgaaatagacttacacactgtacattttcacggccatagcttccaatacaagcacaggggagtttatagttctgatgtctttgacattttccctggaacataccaaaccctagaaatgtttccaagaacacctggaatttggttactccactgccatgtgaccgaccacattcatgctggaatggaaaccacttacaccgttctacaaaatgaaggtgaatatccagacaccaaatctggctgaatgaaataaattggtgataagtggaaaaaagagaaaaaccaatgattcataacaatgtatgtgaaagtgtaaaatagaatgttactttggaatgactataaacattaaaagnagactggnagcatacaactttgtacatttgtgggggaaaactattaattttgcccaaatggaaagatcaacagactatataatgatacatgactgacacttgtacactaggtaataaaactgattcatacagtct

SEQ ID NO: 55 - protein, 1069 aa, Homo sapiens
MKILILGIFLFLCSTPAWAKEKHYYIGIIETTWDYASDHGEKKLISVDTEHSNIYLQNGPDRIGRLYKKALYLQYTDETFRTTIEKPVWLGFLGPIIKAETGDKVYVHLKNLASRPYTFHSHGITYYKEHEGAIYPDNTTDFQRADDKVYPGEQYTYMLLATEEQSPGEGDGNCVTRIYHSHIDAPKDIASGLIGPLIICKKDSLDKEKEKHIDREFVVMFSVVDENFSWYLEDNIKTYCSEPEKVDKDNEDFQESNRMYSVNGYTFGSLPGLSMCAEDRVKWYLFGMGNEVDVHAAFFHGQALTNKNYRIDTINLFPATLFDAYMVAQNPGEWMLSCQNLNHLKAGLQAFFQVQECNKSSSKDNIRGKHVRHYYIAAEEIIWNYAPSGIDIFTKENLTAPGSDSAVFFEQGTTRIGGSYKKLVYREYTDASFTNRKERGPEEEHLGILGPVIWAEVGDTIRVTFHNKGAYPLSIEPIGVRFNKNNEGTYYSPNYNPQSRSVPPSASHVAPTETFTYEWTVPKEVGPTNADPVCLAKMYYSAVDPTKDIFTGLIGPMKICKKGSLHANGRQKDVDKEFYLFPTVFDENESLLLEDNIRMFTTAPDQVDKEDEDFQESNKMHSMNGFMYGNQPGLTMCKGDSVVWYLFSAGNEADVHGIYFSGNTYLWRGERRDTANLFPQTSLTLHMWPDTEGTFNVECLTTDHYTGGMKQKYTVNQCRRQSEDSTFYLGERTYYIAAVEVEWDYSPQREWEKELHHLQEQNVSNAFLDKGEFYIGSKYKKVVYRQYTDSTFRVPVERKAEEEHLGILGPQLHADVGDKVKIIFKNMATRPYSIHAHGVQTESSTVTPTLPGETLTYVWKIPERSGAGTEDSACIPWAYYSTVDQVKDLYSGLIGPLIVCRRPYLKVFNPRRKLEFALLFLVFDENESWYLDDNIKTYSDHPEKVNKDDEEFIESNKMHAINGRMFGNLQGLTMHVGDEVNWYLMGMGNEIDLHTVHFHGHSFQYKHRGVYSSDVFDIFPGTYQTLEMFPRTPGIWLLHCHVTDHIHAGMETTYTVLQNEGEYPDTKSG

SEQ ID NO: 56 - DNA, 2807 bp, Homo sapiens
cgtggtgatgttttctgtggtggatgaaaatttcagctggtacctagaagacaacattaaaacctactgctcagaaccagagaaagttgacaaagacaacgaagacttccaggagagtaacagaatgtattctgtgaatggatacacttttggaagtctcccaggactctccatgtgtgctgaagacagagtaaaatggtacctttttggtatgggtaatgaagttgatgtgcacgcagctttctttcacgggcaagcactgactaacaagaactaccgtattgacacaatcaacctctttcctgctaccctgtttgatgcttatatggtggcccagaaccctggagaatggatgctcagctgtcagaatctaaaccatctgaaagccggtttgcaagcctttttccaggtccaggagtgtaacaagtcttcatcaaaggataatatccgtgggaagcatgttagacactactacattgccgctgaggaaatcatctggaactatgctccctctggtatagacatcttcactaaagaaaacttaacagcacctggaagtgactcagcggtgttttttgaacaaggtaccacaagaattggaggctcttataaaaagctggtttatcgtgagtacacagatgcctccttcacaaatcgaaaggagagaggccctgaagaagagcatcttggcatcctgggtcctgtcatttgggcagaggtgggagacaccatcagagtaaccttccataacaaaggagcatatcccctcagtattgagccgattggggtgagattcaataagaacaacgagggcacatactattccccaaattacaacccccagagcagaagtgtgcctccttcagcctcccatgtggcacccacagaaacattcacctatgaatggactgtccccaaagaagtaggacccactaatgcagatcctgtgtgtctagctaagatgtattattctgctgtggatcccactaaagatatattcactgggcttattgggccaatgaaaatatgcaagaaaggaagtttacatgcaaatgggagacagaaagatgtagacaaggaattctatttgtttcctacagtatttgatgagaatgagagtttactcctggaagataatattagaatgtttacaactgcacctgatcaggtggataaggaagatgaagactttcaggaatctaataaaatgcactccatgaatggattcatgtatgggaatcagccgggtctcactatgtgcaaaggagattcggtcgtgtggtacttattcagcgccggaaatgaggccgatgtacatggaatatacttttcaggaaacacatatctgtggagaggagaacggagagacacagcaaacctcttccctcaaacaagtcttacgctccacatgtggcctgacacagaggggacttttaatgttgaatgccttacaactgatcattacacaggcggcatgaagcaaaaatatactgtgaaccaatgcaggcggcagtctgaggattccaccttctacctgggagagaggacatactatatcgcagcagtggaggtggaatgggattattccccacaaagggagtgggaaaaggagctgcatcatttacaagagcagaatgtttcaaatgcatttttagataagggagagttttacataggctcaaagtacaagaaagttgtgtatcggcagtatactgatagcacattccgtgttccagtggagagaaaagctgaagaagaacatctgggaattctaggtccacaacttcatgcagatgttggagacaaagtcaaaattatctttaaaaacatggccacaaggccctactcaatacatgcccatggggtacaaacagagagttctacagttactccaacattaccaggtgaaactctcacttacgtatggaaaatcccagaaagatctggagctggaacagaggattctgcttgtattccatgggcttattattcaactgtggatcaagttaaggacctctacagtggattaattggccccctgattgtttgtcgaagaccttacttgaaagtattcaatcccagaaggaaactggaatttgcccttctgtttctagtttttgatgagaatgaatcttggtacttagatgacaacatcaaaacatactctgatcaccccgagaaagtaaacaaagatgatgaggaattcatagaaagcaataaaatgcatgctattaatggaagaatgtttggaaacctacaaggcctcacaatgcacgtgggagatgaagtcaactggtatctgatgggaatgggcaatgaaatagacttacacactgtacattttcacggccatagcttccaatacaagcacaggggagtttatagttctgatgtctttgacattttccctggaacataccaaaccctagaaatgtttccaagaacacctggaatttggttactccactgccatgtgaccgaccacattcatgctggaatggaaaccacttacaccgttctacaaaatgaaggtgaatatccagacaccaaatctggctgaatgaaataaattggtgataagtggaaaaaagagaaaaaccaatgattcataacaatgtatgtgaaagtgtaaaatagaatgttactttggaatgactataaacattaaaagaagactggaagcatacaactttgtacatttgtgggggaaaactattaattttgcccaaatggaaagatcaacagactatataatgatacatgactgacacttgtacactaggtaataaaactgattcatacagtct

SEQ ID NO: 57 - protein, 852 aa, Homo sapiens
VVMFSVVDENFSWYLEDNIKTYCSEPEKVDKDNEDFQESNRMYSVNGYTFGSLPGLSMCAEDRVKWYLFGMGNEVDVHAAFFHGQALTNKNYRIDTINLFPATLFDAYMVAQNPGEWMLSCQNLNHLKAGLQAFFQVQECNKSSSKDNIRGKHVRHYYIAAEEIIWNYAPSGIDIFTKENLTAPGSDSAVFFEQGTTRIGGSYKKLVYREYTDASFTNRKERGPEEEHLGILGPVIWAEVGDTIRVTFHNKGAYPLSIEPIGVRFNKNNEGTYYSPNYNPQSRSVPPSASHVAPTETFTYEWTVPKEVGPTNADPVCLAKMYYSAVDPTKDIFTGLIGPMKICKKGSLHANGRQKDVDKEFYLFPTVFDENESLLLEDNIRMFTTAPDQVDKEDEDFQESNKMHSMNGFMYGNQPGLTMCKGDSVVWYLFSAGNEADVHGIYFSGNTYLWRGERRDTANLFPQTSLTLHMWPDTEGTFNVECLTTDHYTGGMKQKYTVNQCRRQSEDSTFYLGERTYYIAAVEVEWDYSPQREWEKELHHLQEQNVSNAFLDKGEFYIGSKYKKVVYRQYTDSTFRVPVERKAEEEHLGILGPQLHADVGDKVKIIFKNMATRPYSIHAHGVQTESSTVTPTLPGETLTYVWKIPERSGAGTEDSACIPWAYYSTVDQVKDLYSGLIGPLIVCRRPYLKVFNPRRKLEFALLFLVFDENESWYLDDNIKTYSDHPEKVNKDDEEFIESNKMHAINGRMFGNLQGLTMHVGDEVNWYLMGMGNEIDLHTVHFHGHSFQYKHRGVYSSDVFDIFPGTYQTLEMFPRTPGIWLLHCHVTDHIHAGMETTYTVLQNEGEYPDTKSG

SEQ ID NO: 58 - DNA, 3321 bp, Homo sapiens
atgaagattttgatacttggtatttttctgtttttatgtagtaccccagcctgggcgaaagaaaagcattattacattggaattattgaaacgacttgggattatgcctctgaccatggggaaaagaaacttatttctgttgacacggaacattccaatatctatcttcaaaatggcccagatagaattgggagactatataagaaggccctttatcttcagtacacagatgaaacctttaggacaactatagaaaaaccggtctggcttgggtttttaggccctattatcaaagctgaaactggagataaagtttatgtacacttaaaaaaccttgcctctaggccctacacctttcattcacatggaataacttactataaggaacatgagggggccatctaccctgataacaccacagattttcaaagagcagatgacaaagtatatccaggagagcagtatacatacatgttgcttgccactgaagaacaaagtcctggggaaggagatggcaattgtgtgactaggatttaccattcccacattgatgctccaaaagatattgcctcaggactcatcggacctttaataatctgtaaaaaagattctctagataaagaaaaagaaaaacatattgaccgagaatttgtggtgatgttttctgtggtggatgaaaatttcagctggtacctagaagacaacattaaaacctactgctcagaaccagagaaagttgacaaagacaacgaagacttccaggagagtaacagaatgtattctgtgaatggatacacttttggaagtctcccaggactctccatgtgtgctgaagacagagtaaaatggtacctttttggtatgggtaatgaagttgatgtgcacgcagctttctttcacgggcaagcactgactaacaagaactaccgtattgacacaatcaacctctttcctgctaccctgtttgatgcttatatggtggcccagaaccctggagaatggatgctcagctgtcagaatctaaaccatctgaaagccggtttgcaagcctttttccaggtccaggagtgtaacaagtcttcatcaaaggataatatccgtgggaagcatgttagacactactacattgccgctgaggaaatcatctggaactatgctccctctggtatagacatcttcactaaagaaaacttaacagcacctggaagtgactcagcggtgttttttgaacaaggtaccacaagaattggaggctcttataaaaagctggtttatcgtgagtacacagatgcctccttcacaaatcgaaaggagagaggccctgaagaagagcatcttggcatcctgggtcctgtcatttgggcagaggtgggagacaccatcagagtaaccttccataacaaaggagcatatcccctcagtattgagccgattggggtgagattcaataagaacaacgagggcacatactattccccaaattacaacccccagagcagaagtgtgcctccttcagcctcccatgtggcacccacagaaacattcacctatgaatggactgtccccaaagaagtaggacccactaatgcagatcctgtgtgtctagctaagatgtattattctgctgtggatcccactaaagatatattcactgggcttattgggccaatgaaaatatgcaagaaaggaagtttacatgcaaatgggagacagaaagatgtagacaaggaattctatttgtttcctacagtatttgatgagaatgagagtttactcctggaagataatattagaatgtttacaactgcacctgatcaggtggataaggaagatgaagactttcaggaatctaataaaatgcactccatgaatggattcatgtatgggaatcagccgggtctcactatgtgcaaaggagattcggtcgtgtggtacttattcagcgccggaaatgaggccgatgtacatggaatatacttttcaggaaacacatatctgtggagaggagaacggagagacacagcaaacctcttccctcaaacaagtcttacgctccacatgtggcctgacacagaggggacttttaatgttgaatgccttacaactgatcattacacaggcggcatgaagcaaaaatatactgtgaaccaatgcaggcggcagtctgaggattccaccttctacctgggagagaggacatactatatcgcagcagtggaggtggaatgggattattccccacaaagggagtgggaaaaggagctgcatcatttacaagagcagaatgtttcaaatgcatttttagataagggagagttttacataggctcaaagtacaagaaagttgtgtatcggcagtatactgatagcacattccgtgttccagtggagagaaaagctgaagaagaacatctgggaattctaggtccacaacttcatgcagatgttggagacaaagtcaaaattatctttaaaaacatggccacaaggccctactcaatacatgcccatggggtacaaacagagagttctacagttactccaacattaccaggtgaaactctcacttacgtatggaaaatcccagaaagatctggagctggaacagaggattctgcttgtattccatgggcttattattcaactgtggatcaagttaaggacctctacagtggattaattggccccctgattgtttgtcgaagaccttacttgaaagtattcaatcccagaaggaagctggaatttgcccttctgtttctagtttttgatgagaatgaatcttggtacttagatgacaacatcaaaacatactctgatcaccccgagaaagtaaacaaagatgatgaggaattcatagaaagcaataaaatgcatgctattaatggaagaatgtttggaaacctacaaggcctcacaatgcacgtgggagatgaagtcaactggtatctgatgggaatgggcaatgaaatagacttacacactgtacattttcacggccatagcttccaatacaagcacaggggagtttatagttctgatgtctttgacattttccctggaacataccaaaccctagaaatgtttccaagaacacctggaatttggttactccactgccatgtgaccgaccacattcatgctggaatggaaaccacttacaccgttctacaaaatgaagacaccaaatctggctgaatgaaataaattggtgataagtggaaaaaagagaaaaaccaatgattcataacaatgtatgtgaaagtgtaaaatagaatgttactttggaatgactataaacattaaaagagactggagcat

SEQ ID NO: 59 - protein, 1065 aa, Homo sapiens
MKILILGIFLFLCSTPAWAKEKHYYIGIIETTWDYASDHGEKKLISVDTEHSNIYLQNGPDRIGRLYKKALYLQYTDETFRTTIEKPVWLGFLGPIIKAETGDKVYVHLKNLASRPYTFHSHGITYYKEHEGAIYPDNTTDFQRADDKVYPGEQYTYMLLATEEQSPGEGDGNCVTRIYHSHIDAPKDIASGLIGPLIICKKDSLDKEKEKHIDREFVVMFSVVDENFSWYLEDNIKTYCSEPEKVDKDNEDFQESNRMYSVNGYTFGSLPGLSMCAEDRVKWYLFGMGNEVDVHAAFFHGQALTNKNYRIDTINLFPATLFDAYMVAQNPGEWMLSCQNLNHLKAGLQAFFQVQECNKSSSKDNIRGKHVRHYYIAAEEIIWNYAPSGIDIFTKENLTAPGSDSAVFFEQGTTRIGGSYKKLVYREYTDASFTNRKERGPEEEHLGILGPVIWAEVGDTIRVTFHNKGAYPLSIEPIGVRFNKNNEGTYYSPNYNPQSRSVPPSASHVAPTETFTYEWTVPKEVGPTNADPVCLAKMYYSAVDPTKDIFTGLIGPMKICKKGSLHANGRQKDVDKEFYLFPTVFDENESLLLEDNIRMFTTAPDQVDKEDEDFQESNKMHSMNGFMYGNQPGLTMCKGDSVVWYLFSAGNEADVHGIYFSGNTYLWRGERRDTANLFPQTSLTLHMWPDTEGTFNVECLTTDHYTGGMKQKYTVNQCRRQSEDSTFYLGERTYYIAAVEVEWDYSPQREWEKELHHLQEQNVSNAFLDKGEFYIGSKYKKVVYRQYTDSTFRVPVERKAEEEHLGILGPQLHADVGDKVKIIFKNMATRPYSIHAHGVQTESSTVTPTLPGETLTYVWKIPERSGAGTEDSACIPWAYYSTVDQVKDLYSGLIGPLIVCRRPYLKVFNPRRKLEFALLFLVFDENESWYLDDNIKTYSDHPEKVNKDDEEFIESNKMHAINGRMFGNLQGLTMHVGDEVNWYLMGMGNEIDLHTVHFHGHSFQYKHRGVYSSDVFDIFPGTYQTLEMFPRTPGIWLLHCHVTDHIHAGMETTYTVLQNEDTKSG

SEQ ID NO: 60 - DNA, 3881 bp, Homo sapiens
  misc_feature (1)...(3881): n = A,T,C or G
agaaagtcttatttataaaattgcctgctcctgattttacttcatttcttctcaggctccaagaaggggaaaaaaatgaagattttgatacttggtatttttctgtttttatgtagtaccccagcctgggcgaaagaaaagcattattacattggaattattgaaacgacttgggattatgcctctgaccatggggaaaagaaacttatttctgttgacacggaacattccaatatctatcttcaaaatggcccagatagaattgggagactatataagaaggccctttatcttcagtacacagatgaaacctttaggacaactatagaaaaaccggtctggcttgggtttttaggccctattatcaaagctgaaactggagataaagtttatgtacacttaaaaaaccttgcctctaggccctacacctttcattcacatggaataacttactataaggaacatgagggggccatctaccctgataacaccacagattttcaaagagcagatgacaaagtatatccaggagagcagtatacatacatgttgcttgccactgaagaacaaagtcctggggaaggagatggcaattgtgtgactaggatttaccattcccacattgatgctccaaaagatattgcctcaggactcatcggacctttaataatctgtaaaaaagattctctagataaagaaaaagaaaaacatattgaccgagaatttgtggtgatgttttctgtggtggatgaaaatttcagctggtacctagaagacaacattaaaacctactgctcagaaccagagaaagttgacaaagacaacgaagacttccaggagagtaacagaatgtattctgtgaatggatacacttttggaagtctcccaggactctccatgtgtgctgaagacagagtaaaatggtacctttttggtatgggtaatgaagttgatgtgcacgcagctttctttcacgggcaagcactgactaacaagaactaccgtattgacacaatcaacctctttcctgctaccctgtttgatgcttatatggtggcccagaaccctggagaatggatgctcagctgtcagaatctaaaccatctgaaagccggtttgcaagcctttttccaggtccaggagtgtaacaagtcttcatcaaaggataatatccgtgggaagcatgttagacactactacattgccgctgaggaaatcatctggaactatgctccctctggtatagacatcttcactaaagaaaacttaacagcacctggaagtgactcagcggtgttttttgaacaaggtaccacaagaattggaggctcttataaaaagctggtttatcgtgagtacacagatgcctccttcacaaatcgaaaggagagaggccctgaagaagagcatcttggcatcctgggtcctgtcatttgggcagaggtgggagacaccatcagagtaaccttccataacaaaggagcatatcccctcagtattgagccgattggggtgagattcaataagaacaacgagggcacatactattccccaaattacaacccccagagcagaagtgtgcctccttcagcctcccatgtggcacccacagaaacattcacctatgaatggactgtccccaaagaagtaggacccactaatgcagatcctgtgtgtctagctaagatgtattattctgctgtggatcccactaaagatatattcactgggcttattgggccaatgaaaatatgcaagaaaggaagtttacatgcaaatgggagacagaaagatgtagacaaggaattctatttgtttcctacagtatttgatgagaatgagagtttactcctggaagataatattagaatgtttacaactgcacctgatcaggtggataaggaagatgaagactttcaggaatctaataaaatgcactccatgaatggattcatgtatgggaatcagccgggtctcactatgtgcaaaggagattcggtcgtgtggtacttattcagcgccggaaatgaggccgatgtacatggaatatacttttcaggaaacacatatctgtggagaggagaacggagagacacagcaaacctcttccctcaaacaagtcttacgctccacatgtggcctgacacagaggggacttttaatgttgaatgccttacaactgatcattacacaggcggcatgaagcaaaaatatactgtgaaccaatgcaggcggcagtctgaggattccaccttctacctgggagagaggacatactatatcgcagcagtggaggtggaatgggattattccccacaaagggagtgggaaaaggagctgcatcatttacaagagcagaatgtttcaaatgcatttttagataagggagagttttacataggctcaaagtacaagaaagttgtgtatcggcagtatactgatagcacattccgtgttccagtggagagaaaagctgaagaagaacatctgggaattctaggtccacaacttcatgcagatgttggagacaaagtcaaaattatctttaaaaacatggccacaaggccctactcaatacatgcccatggggtacaaacagagagttctacagttactccaacattaccaggtgaaactctcacttacgtatggaaaatcccagaaagatctggagctggaacagaggattctgcttgtattccatgggcttattattcaactgtggatcaagttaaggacctctacagtggattaattggccccctgattgtttgtcgaagaccttacttgaaagtattcaatcccagaaggaagctggaatttgcccttctgtttctagtttttgatgagaatgaatcttggtacttagatgacaacatcaaaacatactctgatcaccccgagaaagtaaacaaagatgatgaggaattcatagaaagcaataaaatgcatgctattaatggaagaatgtttggaaacctacaaggcctcacaatgcacgtgggagatgaagtcaactggtatctgatgggaatgggcaatgaaatagacttacacactgtacattttcacggccatagcttccaatacaagcacaggggagtttatagttctgatgtctttgacattttccctggaacataccaaaccctagaaatgtttccaagaacacctggaatttggttactccactgccatgtgaccgaccacattcatgctggaatggaaaccacttacaccgttctacaaaatgaagcatcttctgagactcacaggagaatatggaatgtgatctacccaatcacagtcagtgtgattattttattccaaatatctaccaaggaatgaccaggagaataagatcctccgatgttcgcaatggtgtggtgtcaggaggctgcctcttagacaatctccagatgttactgtgatgtgagtttgaaaaagagttcctgaagtaccacatctgggagacatgccactagctgagcttcccaaaagtctaccaagagctgaggaattgtatcttcatccttgcacaaagcaccttaaaaacagtaaaaggagcctctatattccagataaatatagcactgataaagcgacagctgggcntgaatatcacagcatcacatgggccacgcaatcaataatttaccattagcattagcgccatggcaaaagcaaatttagacatttttaaaaggaaacagattctaggatgtacaaataaagtttctacagatatagtcttttaattagtacttttatcttataaactgattatgtatgtctgttttttcaataaacaaacaaatgaaaaaaaaaaaaaaaaaatggcggccgcaagcttattancctttagtgagggttaattttaa

SEQ ID NO: 61 - protein, 1090 aa, Homo sapiens
MKILILGIFLFLCSTPAWAKEKHYYIGIIETTWDYASDHGEKKLISVDTEHSNIYLQNGPDRIGRLYKKALYLQYTDETFRTTIEKPVWLGFLGPIIKAETGDKVYVHLKNLASRPYTFHSHGITYYKEHEGAIYPDNTTDFQRADDKVYPGEQYTYMLLATEEQSPGEGDGNCVTRIYHSHIDAPKDIASGLIGPLIICKKDSLDKEKEKHIDREFVVMFSVVDENFSWYLEDNIKTYCSEPEKVDKDNEDFQESNRMYSVNGYTFGSLPGLSMCAEDRVKWYLFGMGNEVDVHAAFFHGQALTNKNYRIDTINLFPATLFDAYMVAQNPGEWMLSCQNLNHLKAGLQAFFQVQECNKSSSKDNIRGKHVRHYYIAAEEIIWNYAPSGIDIFTKENLTAPGSDSAVFFEQGTTRIGGSYKKLVYREYTDASFTNRKERGPEEEHLGILGPVIWAEVGDTIRVTFHNKGAYPLSIEPIGVRFNKNNEGTYYSPNYNPQSRSVPPSASHVAPTETFTYEWTVPKEVGPTNADPVCLAKMYYSAVDPTKDIFTGLIGPMKICKKGSLHANGRQKDVDKEFYLFPTVFDENESLLLEDNIRMFTTAPDQVDKEDEDFQESNKMHSMNGFMYGNQPGLTMCKGDSVVWYLFSAGNEADVHGIYFSGNTYLWRGERRDTANLFPQTSLTLHMWPDTEGTFNVECLTTDHYTGGMKQKYTVNQCRRQSEDSTFYLGERTYYIAAVEVEWDYSPQREWEKELHHLQEQNVSNAFLDKGEFYIGSKYKKVVYRQYTDSTFRVPVERKAEEEHLGILGPQLHADVGDKVKIIFKNMATRPYSIHAHGVQTESSTVTPTLPGETLTYVWKIPERSGAGTEDSACIPWAYYSTVDQVKDLYSGLIGPLIVCRRPYLKVFNPRRKLEFALLFLVFDENESWYLDDNIKTYSDHPEKVNKDDEEFIESNKMHAINGRMFGNLQGLTMHVGDEVNWYLMGMGNEIDLHTVHFHGHSFQYKHRGVYSSDVFDIFPGTYQTLEMFPRTPGIWLLHCHVTDHIHAGMETTYTVLQNEASSETHRRIWNVIYPITVSVIILFQISTKE

SEQ ID NO: 62 - DNA, 969 bp, Homo sapiens
agctttggggttgtccctggacttgtcttggttccagaacctgacgacccggcgacggcgacgtctcttttgactaaaagacagtgtccagtgctccagcctaggagtctacggggaccgcctcccgcgccgccaccatgcccaacttctctggcaactggaaaatcatccgatcggaaaacttcgaggaattgctcaaagtgctgggggtgaatgtgatgctgaggaagattgctgtggctgcagcgtccaagccagcagtggagatcaaacaggagggagacactttctacatcaaaacctccaccaccgtgcgcaccacagagattaacttcaaggttggggaggagtttgaggagcagactgtggatgggaggccctgtaagagcctggtgaaatgggagagtgagaataaaatggtctgtgagcagaagctcctgaagggagagggccccaagacctcgtggaccagagaactgaccaacgatggggaactgatcctgaccatgacggcggatgacgttgtgtgcaccagggtctacgtccgagagtgagtggccacaggtagaaccgcggccgaagcccaccactggccatgctcaccgccctgcttcactgccccctccgtcccaccccctccttctaggatagcgctccccttaccccagtcacttctgggggtcactgggatgcctcttgcagggtcttgctttctttgacctcttctctcctcccctacaccaacaaagaggaatggctgcaagagcccagatcacccattccgggttcactccccgcctccccaagtcagcagtcctagccccaaaccagcccagagcagggtctctctaaaggggacttgagggcctgagcaggaaagactggccctctagcttctaccctttgtccctgtagcctatacagtttagaatatttatttgttaattttattaaaatgctttaaaaaaa

SEQ ID NO: 63 - protein, 138 aa, Homo sapiens
MPNFSGNWKIIRSENFEELLKVLGVNVMLRKIAVAAASKPAVEIKQEGDTFYIKTSTTVRTTEINFKVGEEFEEQTVDGRPCKSLVKWESENKMVCEQKLLKGEGPKTSWTRELTNDGELILTMTADDVVCTRVYVRE

SEQ ID NO: 64 - DNA, 927 bp, Homo sapiens
ggaagtttaggttaactgtcttaaatttccaaagctgtaatcattattttcattctcaaagtgatggccttgtgttttgctcctctcctccagggccagactgagcccaggttgatttcaggcggacaccaatagactccacagcagctccaggagcccagacaccggcggccagaagcaaggctaggagctgctgcagccatgtcggccctcagcctcctcattctgggcctgctcacggcagtgccacctgccagctgtcagcaaggcctggggaaccttcagccctggatgcagggccttatcgcggtggccgtgttcctggtcctcgttgcaatcgcctttgcagtcaaccacttctggtgccaggaggagccggagcctgcacacatgatcctgaccgtcggaaacaaggcagatggagtcctggtgggaacagatggaaggtactcttcgatggcggccagtttcaggtccagtgagcatgagaatgcctatgagaatgtgcccgaggaggaaggcaaggtccgcagcaccccgatgtaaccttctctgtggctccaaccccaagactcccaggcacatgggatggatgtccagtgctaccacccaagccccctccttctttgtgtggaatctgcaatagtgggctgactccctccagccccatgccggccctacccgcccttgaagtatagccagccaaggttggagctcagaccgtgtctaggttggggctcggctgtggccctggggtctcctgctcagctcagaagagccttctggagaggacagtcagctgagcacctcccatcctgctcacacgtccttccccataactatggaaatggccctaatttctgtgaaataaagactttttgtatttctggggctgaggctcagcaacagcccctcaggcttccaaaa

SEQ ID NO: 65 - protein, 114 aa, Homo sapiens
MSALSLLILGLLTAVPPASCQQGLGNLQPWMQGLIAVAVFLVLVAIAFAVNHFWCQEEPEPAHMILTVGNKADGVLVGTDGRYSSMAASFRSSEHENAYENVPEEEGKVRSTPM

SEQ ID NO: 66 - DNA, 3641 bp, Homo sapiens
ctgcactgaagagggagagcgagagagagactggagacgcacagatccccccaaggtctcccaagcctaccgtcccacagattattgtacagagccccaaaaatcgaaacagaggaaacgaacagcagttgaacatggacgaaggaattcctcatttgcaagagagacagttactggaacatagagattttataggactggactattcctctttgtatatgtgtaaacccaaaaggagcatgaaacgagacgacaccaaggatacctacaaattaccgcacagattaatagaaaagaaaagaagagaccgaattaatgaatgcattgctcagctgaaagatttactgcctgaacatctgaaattgacaactctgggacatctggagaaagctgtagtcttggaattaactttgaaacacttaaaagctttaaccgccttaaccgagcaacagcatcagaagataattgctttacagaatggggagcgatctctgaaatcgcccattcagtccgacttggatgcgttccactcgggatttcaaacatgcgccaaagaagtcttgcaatacctctcccggtttgagagctggacacccagggagccgcggtgtgtccagctgatcaaccacttgcacgccgtggccacccagttcttgcccaccccgcagctgttgactcaacaggtccctctgagcaaaggcaccggcgctccctcggccgccgggtccgcggccgccccctgcctggagcgcgcggggcagaagctggagcccctcgcctactgcgtgcccgtcatccagcggactcagcccagcgccgagctcgccgccgagaacgacacggacaccgacagcggctacggcggcgaagccgaggcccggccggaccgcgagaaaggcaaaggcgcgggggcgagccgcgtcaccatcaagcaggagcctcccggggaggactcgccggcgcccaagaggatgaagctggattcccgcggcggcggcagcggcggcggcccggggggcggcgcggcggcggcggcagccgcgcttctggggcccgaccctgccgccgcggccgcgctgctgagacccgacgccgccctgctcagctcgctggtggcgttcggcggaggcggaggcgcgcccttcccgcagcccgcggccgccgcggcccccttctgcctgcccttctgcttcctctcgccttctgcagctgccgcctacgtgcagcccttcctggacaagagcggcctggagaagtatctgtacccggcggcggctgccgccccgttcccgctgctataccccggcatccccgccccggcggcagccgcggcagccgccgccgccgctgccgccgccgccgccgcgttcccctgcctgtcctcggtgttgtcgccccctcccgagaaggcgggcgccgccgccgcgaccctcctgccgcacgaggtggcgccccttggggcgccgcacccccagcacccgcacggccgcacccacctgcccttcgccgggccccgcgagccggggaacccggagagctctgctcaggaagatccctcgcagccaggaaaggaagctccctgaatccttgcgtcccgaaggacggaggttcaagcagagtgagaagttaaaatacccttaaggaggttcaagcagagtgagaagttaaaatacccttaaggtctttaagggaggaagtgtaatagatgcacgacaggcataaacaagaacaacaaaacaggtgttatgtgtacattcggagttcctgttttgctcatcccgcaccaccccaccctccacacactaacatccctttcttccccccaccagctgtaaaagatcctatgcgaaagacactggctcttttttttaatcccccaaataaattttgcccccttttaggccatgttccattatctcttaaaattggaacctaattcgagaggaagtaagaagggtctgttctgtggctgagctaggtgaaccccggggtaggggaaagatgttaacacctttgacgtctttggagttgacatggaacagcaggtagttgttatgtagagctagttctcaaagctgccctgcctgttttaggaggcgttccacaaacagattgaggctctttttagaattgaatttactcttcagtattttctaatgttcagctttctaaaaggcatatatttttcaaagaagtgaggatgcagtttctcacgttgcaacctattctgaagtggtttaaatggtatctcttagtaacttgcactcgttaaagaaacacggagctgggccatcgtcagaactaagtcagggaaggagatggatgagaaggccagaatcattcctagtacatttgctaacactttattgagaaattgaccatgaattaatggactcatcttaatttcttctaagtccatatatagatagatatctatctgtacagatttctatttatccatagataggtatctatacatacacatctcaagtgcatctattcccactctcattaatccatcatgttcctaaatttttgtaatcttactgtaaaaaaaagtgcactgaacttcaaaacaaaacaaaaaacaacaacaacaaaaaacaagtccaaactgatatatcctatattctgttaaaattcaaaagtgaacgaaagcatttaactggccagttttgattgcaaatgctgtaaagatatagaatgaagtcctgtgaggccttcctatctccaagtctatgtattttctggagaccaaaccagataccagataatcacaaagaaagcttttttaataaggcttaaaccaagaccttgtctagatatttttagtttgttgccaaggtagcactgtgagaaatctcacttggatgttatgtaaggggtgagacacaacagtctgactatgagtgaggaaaatatctgggtcttttcgtcagtttggtgcatttgctgctgctgttgctactgtttgcctcaaacgctgtgtttaaacaacgttaaactcttagcctacaaggtggctcttatgtacatagttgttaatacatccaattaatgatgtctgacatgctatttttgtagggagaaaatatgtgctaatgatattttgagttaaaatatcttttggggaggatttgctgaaaagttgcacttttgttacaatgcttatgcttggtacaagcttatgctgtcttaaattattttaaaaaaattaaatactgtctgtgagaaaccagctggtttagaaaagtttagtatgtgacgataaactagaaattacctttatattctagtattttcagcactccataaattctattacctaaatattgccacactattttgtgatttaaaaattcttactaaggaataaaaactttaatatacgatatgatattgtctaataattaaaaaagacataatggatgctcaattagttttaagatatctataactatagggatacaaatcactacagttctcagatttacaccttttttttgtcattggcttgatgtcacacatttccaatctcttgcaagcctccaggctctggctttgtctacctgctcgttcccaatgtatcttaatgaaaagtgcaaaagaaaaacctaccaattaaaaaaaaaaaaaaaaaa

SEQ ID NO: 67 - protein, 482 aa, Homo sapiens
MDEGIPHLQERQLLEHRDFIGLDYSSLYMCKPKRSMKRDDTKDTYKLPHRLIEKKRRDRINECIAQLKDLLPEHLKLTTLGHLEKAVVLELTLKHLKALTALTEQQHQKIIALQNGERSLKSPIQSDLDAFHSGFQTCAKEVLQYLSRFESWTPREPRCVQLINHLHAVATQFLPTPQLLTQQVPLSKGTGAPSAAGSAAAPCLERAGQKLEPLAYCVPVIQRTQPSAELAAENDTDTDSGYGGEAEARPDREKGKGAGASRVTIKQEPPGEDSPAPKRMKLDSRGGGSGGGPGGGAAAAAAALLGPDPAAAAALLRPDAALLSSLVAFGGGGGAPFPQPAAAAAPFCLPFCFLSPSAAAAYVQPFLDKSGLEKYLYPAAAAAPFPLLYPGIPAPAAAAAAAAAAAAAAAAFPCLSSVLSPPPEKAGAAAATLLPHEVAPLGAPHPQHPHGRTHLPFAGPREPGNPESSAQEDPSQPGKEAP

SEQ ID NO: 68 - DNA, 3624 bp, Homo sapiens
tagtctaactcgcggctgtcaccgccactgcagcggagccggccggccgggcgctgcgggacgggcgggcggctgccggcaggaggcgccgagccgggtgactgccgcggcgggcacagtccggggccacagcgccgagcccgggcgggagtggccccgcgcaggcagggagcggcgccgcgcactccaacccggcgggcacctcgggggcgggcgcggggcgcagccttctcgtcccggcctctgtgacaagcgccccggagccgggagcccgattgccgggctcggggtgggcgcggacgcaggcactgggctcgtgcggggccccgggcgtcgcgatgaacatcgtggtggagttcttcgtggtcactttcaaagtgctctgggcgttcgtgctggccgcggcgcgctggctggtgcggcccaaggagaagagcgtggcgggccaggtgtgcctcatcaccggcgccggcagcggcctgggccgcctcttcgcgctggagttcgcccggcgtcgggcgctgctggtgctgtgggacatcaacacgcaaagcaacgaggagacggctggcatggtgcgccacatctaccgcgacctggaggcggccgacgccgctgcgctgcaagctgggaatggtgaggaagaaattctgccccactgtaacttgcaggtttttacctacacctgtgacgtggggaagagggagaacgtctacctgacggctgaaagagtccgcaaggaggttggcgaagtctcagtcctggtcaataatgctggtgtggtctctgggcatcaccttctggaatgtcctgatgagctcattgagagaaccatgatggtcaattgccatgcacacttctggaccactaaggcttttcttcctacgatgctggagattaatcatggtcatattgtgacagttgcaagttccttgggattgttcagtactgccggagttgaggattactgtgccagtaaatttggagttgtgggttttcatgaatccctgagccatgaactaaaggctgctgaaaaggatggaattaaaacaaccttggtttgcccttatcttgtagacactggcatgttcagaggctgccgaatcaggaaagaaattgagccttttctgccacctctgaagcctgattactgtgtgaagcaggccatgaaggccatcctcactgaccagcccatgatctgcactccccgcctcatgtacatcgtgaccttcatgaagagcatcctaccatttgaagcagttgtgtgcatgtatcggttcctaggagcggacaagtgtatgtacccctttattgctcaaagaaagcaagccacaaacaataatgaagcaaaaaatggaatctaagaatctttttgtatggaatattacttctatcagaagatgatcaagatgtttcagtccagtgcacatcagcattgctgacattttatggattctaaacttgtgttgtttcttttttaaatcaactttttaaaaaaataaagtgtaaattaaccgactagagtacttggaaaatgtgatcagtacaagtgaacttaggttgttgccaacagggtccttttaggcagaacccagaaaccagtcaaatctgtagagaagcagtgtgacatcttcaggttaccattattttttaatgagcaggaagtctagaaatgataactagactgtatgtttcatgtgtgtgatttttcagaattcccagagtttactcattcttgttattaaactctagccagttgacatcttcgcaatttcaaggactgatagtgctgtattttctcacgttttctaagtttccgttttgcaaggcctaggtgactttttcatggtgtttgtatgtttagctcttttgaaaaggaattttgaaatctccatcaactgaagtaaatgatgtctgagtgttacagtwaaggtgaccaagtctctttcttaaagtcacaatgactaaagtattagttgaatttttttttttttttttgatggagtctcgctctgtcaccaggctggagtgcagtagcacaatcacggctcactgcaatctctgcctcccrgtttcaagtgattctgctgtctcagcctcccaagtagctgggactacaggcatgcgccaccacgcccagctaatttttgtatttttagtagagacggggtttcaccatgttggtcaggatggtctccatctcttgacattgtgatccacctgcctcggcctcccaaagtgctgggattacaggcatgagccactgcacccagccttgaatttttaattttatctctgatatacttcattaagtgtctggagacctaattatcctaaaagatcatacattttctacctatgaattttgctgcatacagaaagtgccctttcctcaggaagttgctgtgtttcatttctttggatggactcttatctagaatacatagcagctctgcaaagaaacagtttttaaaaatgggaacttctacattgaaaagtccccatttttgtgccaactatgattagtgagaggaagaaatcttattctatggcatatgtatggaagggtgtaaagattcttttgaaaggtttattcacattgtagaacagcaaatgacatttttacagtatttttttgtaaagcaaactattttgtgccttgaatttggtatatgtgtattagtgaaacattgtaaaggtgaacttctacctctgtatctaaatgtataccatccacttgtaaatgactataaactattatgtgattgcttttttttttagaatgtcttgtttaaatagtggccaatgtttaaggctgttaaaataagccaacttttactaattggggagttttataaatgactgattaaatttaaagaattaacttacatgcaattgtgtgattattagttatcagcagtgttgtaaggaaaattattgtgtttttttttatgatcattatcccactttaggtaaagaaaaatattggaatggaatagtgttgggaaacagacattaacaacctagggtgcctgcactcaaatagccgatgttactgtccctagattagagacttgattaagggcttgtttgtaccaaaagtggggaaacaatgccatgacctgtgttttagtttggctgcaccacagatcaaatctgcactgtgtctacatataggaaaggtcctggtgtgtgctaatgttcccaatgcaggacttgaggaagagctctgttatatgtttccatttctctttatcaaagataaccaaaccttatggcccttataacaatggaggcactggctgcctcttaattttcaatcatggacctaaagaagtactctgaagggtctcaacaatgccaggtggggacagatatactcagagattatccaggtctgcctcccagcgagcctggagtacaccagaccctcctagagaaatctgttataatttaacaacccacttatccaccttaaaactgaggaaagtcgtctttacatctaattttattcttgtgtgttataacttaaacctatttctatttttgtttgttattgcccttataagggtgtccatctccaagttcaataaactaattcatttaaaaaaaaaaaaaaaaaaa

SEQ ID NO: 69 - protein, 341 aa, Homo sapiens
MNIVVEFFVVTFKVLWAFVLAAARWLVRPKEKSVAGQVCLITGAGSGLGRLFALEFARRRALLVLWDINTQSNEETAGMVRHIYRDLEAADAAALQAGNGEEEILPHCNLQVFTYTCDVGKRENVYLTAERVRKEVGEVSVLVNNAGVVSGHHLLECPDELIERTMMVNCHAHFWTTKAFLPTMLEINHGHIVTVASSLGLFSTAGVEDYCASKFGVVGFHESLSHELKAAEKDGIKTTLVCPYLVDTGMFRGCRIRKEIEPFLPPLKPDYCVKQAMKAILTDQPMICTPRLMYIVTFMKSILPFEAVVCMYRFLGADKCMYPFIAQRKQATNNNEAKNGI

SEQ ID NO: 70 - DNA, 1428 bp, Homo sapiens
ggcacgaggcggagacagagacttcacgactcccagtctcctcctcgccgcggccgccgcctcctccttctctcctcctcctcttcctcctcctccctcgctcccacagccatgtctgcttagaccagagcagccccacagccaactagggcagctgccgccgccacaacagcaaggacagccgctgccgccgcccgtgagcgatgacaggagtgtttgacagaagggtccccagcatccgatccggcgacttccaagctccgttccagacgtccgcagctatgcaccatccgtctcaggaatcgccaactttgcccgagtcttcagctaccgattctgactactacagccctacggggggagccccgcacggctactgctctcctacctcggcttcctatggcaaagctctcaacccctaccagtatcagtatcacggcgtgaacggctccgccgggagctacccagccaaagcttatgccgactatagctacgctagctcctaccaccagtacggcggcgcctacaaccgcgtcccaagcgccaccaaccagccagagaaagaagtgaccgagcccgaggtgagaatggtgaatggcaaaccaaagaaagttcgtaaacccaggactatttattccagctttcagctggccgcattacagagaaggtttcagaagactcagtacctcgccttgccggaacgcgccgagctggccgcctcgctgggattgacacaaacacaggtgaaaatctggtttcagaacaaaagatccaagatcaagaagatcatgaaaaacggggagatgcccccggagcacagtcccagctccagcgacccaatggcgtgtaactcgccgcagtctccagcggtgtgggagccccagggctcgtcccgctcgctcagccaccaccctcatgcccaccctccgacctccaaccagtccccagcgtccagctacctggagaactctgcatcctggtacacaagtgcagccagctcaatcaattcccacctgccgccgccgggctccttacagcacccgctggcgctggcctccgggacactctattagatgggctgctctctcttactctcttttttgggactactgtgttttgctgttctagaaaatcataaagaaaggaattcatatggggaagttcggaaaactgaaaaagattcatgtgtaaagcttttttttgcatgtaagttattgcatttcaaaagaccccccctttttttacagaggactttttttgcgcaactgtggacactttcaatggtgccttgaaatctatgacctcaacttttcaaaagacttttttcaatgttattttagccatgtaaataagtgtagatagaggaattaaactgtatattctggataaataaaattatttcgaccatgaaaaaaaaaaaaaaaaaaa

SEQ ID NO: 71 - protein, 289 aa, Homo sapiens
MTGVFDRRVPSIRSGDFQAPFQTSAAMHHPSQESPTLPESSATDSDYYSPTGGAPHGYCSPTSASYGKALNPYQYQYHGVNGSAGSYPAKAYADYSYASSYHQYGGAYNRVPSATNQPEKEVTEPEVRMVNGKPKKVRKPRTIYSSFQLAALQRRFQKTQYLALPERAELAASLGLTQTQVKIWFQNKRSKIKKIMKNGEMPPEHSPSSSDPMACNSPQSPAVWEPQGSSRSLSHHPHAHPPTSNQSPASSYLENSASWYTSAASSINSHLPPPGSLQHPLALASGTLY

SEQ ID NO: 72 - DNA, 2036 bp, Homo sapiens
gacagcttgaaccattcccctggccagagtggattcctcagctatggctccagcttcagcacctcacccactggacagagcccatacacctaccagatgcacggcacaacagggttctatcaaggaggaaatggactgggcaacgcagccggtttcgggagtgtgcaccaggactatccttcctaccccggcttcccccagagccagtacccccagtattacggctcatcctacaaccctccctacgtcccggccagcagcatctgcccttcgcccctctccacgtccacctacgtcctccaggaggcatctcacaacgtccccaaccagagttccgagtcacttgctggtgaatacaacacacacaatggaccttccacaccagcgaaagagggagacacagacaggccgcaccgggcctccgacgggaagctccgaggccggtctaagaggagcagtgacccgtccccggcaggggacaatgagattgagcgtgtgttcgtgtgggacttggatgagacaataattatttttcactccttactcacggggacatttgcatccagatacgggaaggacaccacgacgtccgtgcgcattggccttatgatggaagagatgatcttcaaccttgcagatacacatctgttcttcaatgacctggaggattgtgaccagatccacgttgatgacgtctcatcagatgacaatggccaagatttaagcacatacaacttctccgctgacggcttccacagttcggccccaggagccaacctgtgcctgggctctggcgtgcacggcggcgtggactggatgaggaagctggccttccgctaccggcgggtgaaggagatgtacaatacctacaagaacaacgttggtgggttgataggcactcccaaaagggagacctggctacagctccgagctgagctggaagctctcacagacctctggctgacccactccctgaaggcactaaacctcatcaactcccggcccaactgtgtcaatgtgctggtcaccaccactcaactaattcctgccctggccaaagtcctgctatatggcctggggtctgtgtttcctattgagaacatctacagtgcaaccaagacagggaaggagagctgcttcgagaggataatgcagagattcggcagaaaagctgtctacgtggtgatcggtgatggtgtggaagaggagcaaggagcgaaaaagcacaacatgcctttctggcggatatcctgccacgcagacctggaggcactgaggcacgccctggagctggagtatttatagcaggatcagcagcatctccacctgccatctcaccctcagaccccctcgccttccccacctccccaccgagaactccagagacccagatgttggacaccaggaaggggccccacagccgagacgacgtgtccagtgaccatctcagaagccgtccatcagtccaaatgggggttctgagaaggaaagtacccaacattggcttcggagtatttgactttggggaaaagggctggctcggagtctagactcttctgtaagactcacagaacaaaagcaaggaattgccaatttggggggtgcctggtgatgaggaggggatgggtttgtcttgtcttctttttaatttatggactagtctcattactccagaattatgctcttgtacctgtgtggctgggtttcttagtcgttggtttggtttggttttttgaactggtatgtagggtggttcacagttctaatgtaagcactctcttctccaagttgtgctttgtggggacaatcattctttgaacattagagaggaaggcagttcaagctgttgaaaagactattgcttatttttgtttttaaagacctacttgacgtcatgtggacagtgcacgtgccttacgctacatcttgttttctaggaagagggggatgctgggaaggaatgggtgctttgtgatggataaaaggcattaaataaaaccacgtttacattttgaaaaaaaaaaaaaaaaaaaaaa

SEQ ID NO: 73 - protein, 434 aa, Homo sapiens
DSLNHSPGQSGFLSYGSSFSTSPTGQSPYTYQMHGTTGFYQGGNGLGNAAGFGSVHQDYPSYPGFPQSQYPQYYGSSYNPPYVPASSICPSPLSTSTYVLQEASHNVPNQSSESLAGEYNTHNGPSTPAKEGDTDRPHRASDGKLRGRSKRSSDPSPAGDNEIERVFVWDLDETIIIFHSLLTGTFASRYGKDTTTSVRIGLMMEEMIFNLADTHLFFNDLEDCDQIHVDDVSSDDNGQDLSTYNFSADGFHSSAPGANLCLGSGVHGGVDWMRKLAFRYRRVKEMYNTYKNNVGGLIGTPKRETWLQLRAELEALTDLWLTHSLKALNLINSRPNCVNVLVTTTQLIPALAKVLLYGLGSVFPIENIYSATKTGKESCFERIMQRFGRKAVYVVIGDGVEEEQGAKKHNMPFWRISCHADLEALRHALELEYL

SEQ ID NO: 74 - DNA, 1907 bp, Homo sapiens
cggccagatacctcagcgctacctggcggaactggatttctctcccgcctgccggcctgcctgccacagccggactccgccactccggtagcctcatggctgcaacctgtgagattagcaacatttttagcaactacttcagtgcgatgtacagctcggaggactccaccctggcctctgttccccctgctgccacctttggggccgatgacttggtactgaccctgagcaacccccagatgtcattggagggtacagagaaggccagctggttgggggaacagccccagttctggtcgaagacgcaggttctggactggatcagctaccaagtggagaagaacaagtacgacgcaagcgccattgacttctcacgatgtgacatggatggcgccaccctctgcaattgtgcccttgaggagctgcgtctggtctttgggcctctgggggaccaactccatgcccagctgcgagacctcacttccagctcttctgatgagctcagttggatcattgagctgctggagaaggatggcatggccttccaggaggccctagacccagggccctttgaccagggcagcccctttgcccaggagctgctggacgacggtcagcaagccagcccctaccaccccggcagctgtggcgcaggagccccctcccctggcagctctgacgtctccaccgcagggactggtgcttctcggagctcccactcctcagactccggtggaagtgacgtggacctggatcccactgatggcaagctcttccccagcgatggttttcgtgactgcaagaagggggatcccaagcacgggaagcggaaacgaggccggccccgaaagctgagcaaagagtactgggactgtctcgagggcaagaagagcaagcacgcgcccagaggcacccacctgtgggagttcatccgggacatcctcatccacccggagctcaacgagggcctcatgaagtgggagaatcggcatgaaggcgtcttcaagttcctgcgctccgaggctgtggcccaactatggggccaaaagaaaaagaacagcaacatgacctacgagaagctgagccgggccatgaggtactactacaaacgggagatcctggaacgggtggatggccggcgactcgtctacaagtttggcaaaaactcaagcggctggaaggaggaagaggttctccagagtcggaactgagggttggaactatacccgggaccaaactcacggaccactcgaggcctgcaaaccttcctgggaggacaggcaggccagatggcccctccactggggaatgctcccagctgtgctgtggagagaagctgatgttttggtgtattgtcagccatcgtccttggactcggagactatggcctcgcctccccaccctcctcttggaattacaagccctggggtttgaagctgactttatagctgcaagtgtatctccttttatctggtgcctcctcaaacccagtctcagacacttaaatgcagacaacaccttcttcctgcagacacttggactgagccaaggaggcttgggaggccctagggagcaccgtgatggagaggacagagcaggggctccagcacttctttctggactggcgttcacctccctgctcagtgcttgggctccacgggcaggggtcagagcactccctaatttatgtgctatataaatatgtcagatgtacatagagatctattttttctaaaacattcccctccccactcctctcccacagagtgctggactgttccaggccctccagtgggctgatgctgggacccttaggatggggctcccagctcctttctcctgtgaatggaggcagagacctccaataaagtgccttctgggctttttctaaaaaaaaaaaaaaaaaa

SEQ ID NO: 75 - protein, 371 aa, Homo sapiens
MAATCEISNIFSNYFSAMYSSEDSTLASVPPAATFGADDLVLTLSNPQMSLEGTEKASWLGEQPQFWSKTQVLDWISYQVEKNKYDASAIDFSRCDMDGATLCNCALEELRLVFGPLGDQLHAQLRDLTSSSSDELSWIIELLEKDGMAFQEALDPGPFDQGSPFAQELLDDGQQASPYHPGSCGAGAPSPGSSDVSTAGTGASRSSHSSDSGGSDVDLDPTDGKLFPSDGFRDCKKGDPKHGKRKRGRPRKLSKEYWDCLEGKKSKHAPRGTHLWEFIRDILIHPELNEGLMKWENRHEGVFKFLRSEAVAQLWGQKKKNSNMTYEKLSRAMRYYYKREILERVDGRRLVYKFGKNSSGWKEEEVLQSRN

SEQ ID NO: 76 - DNA, 3951 bp, Homo sapiens
  misc_feature (1)...(3951): n = A,T,C or G
nngacccacgcgtccgggtgcggtctggacacgtctccggggtgggtcgtccggccttcgatcttagacgaattttacaatgtgaagttctgcatagatgccagtcaaccagatgttggaagctggctcaagtacattagattcgctggctgttatgatcagcacaaccttgttgcatgccagataaatgatcagatattctatagagtagttgcagacattgcgccgggagaggagcttctgctgttcatgaagagcgaagactatccccatgaaactatggcgccggatatccacgaagaacggcaatatcgctgcgaagactgtgaccagctctttgaatctaaggctgaactagcagatcaccaaaagtttccatgcagtactcctcactcagcattttcaatggttgaagaggactttcagcaaaaactcgaaagcgagaatgatctccaagagatacacacgatccaggagtgtaaggaatgtgaccaagtttttcctgatttgcaaagcctggagaaacacatgctgtcacatactgaagagagggaatacaagtgtgatcagtgtcccaaggcatttaactggaagtccaatttaattcgccaccagatgtcacatgacagtggaaagcactatgaatgtgaaaactgtgccaaggttttcacggaccctagcaaccttcagcggcacattcgctctcagcatgtcggtgcccgggcccatgcatgcccggagtgtggcaaaacgtttgccacttcgtcgggcctcaaacaacacaagcacatccacagcagtgtgaagccctttatctcattctctcaatcaatgtacccatttcctgatagagacttgagatcgttacctttgaaaatggaaccccaatcaccaggtgaagtaaagaaactgcagaagggcagctctgagtccccctttgatctcaccactaagcgaaaggatgagaagcccttgactccagtcccctccaagcctccagtgacacctgccacaagccaagaccagcccctggatctaagtatgggcagtaggagtagagccagtgggacaaagctgactgagcctcgaaaaaaccacgtgtttgggggaaaaaaaggaagcaacgtcgaatcaagacctgcttcagatggttccttgcagcatgcaagacccactcctttctttatggaccctatttacagagtagagaaaagaaaactaactgacccacttgaagctttaaaagagaaatacttgaggccttctccaggattcttgtttcacccacaaatgtcagctattgaaaacatggcagaaaagctagagagcttcagtgccctgaaacctgaggccagtgagctcttacagtcagtgccctctatgttcaacttcagggcgcctcccaatgccctgccagagaaccttctgcggaagggaaaggagcgctatacctgcagatactgtggcaagatttttccaaggtctgcaaacctaacacggcacttgagaacccacacaggagagcagccttacagatgcaaatactgtgacagatcatttagcatatcttctaacttgcaaaggcatgttcgcaacatccacaataaagagaagccatttaagtgtcacttatgtgataggtgttttggtcaacaaaccaatttagacagacacctaaagaaacatgagaatgggaacatgtccggtacagcaacatcgtcgcctcattctgaactggaaagtacaggtgcgattctggatgacaaagaagatgcttacttcacagaaattcgaaatttcattgggaacagcaaccatggcagccaatctcccaggaatgtggaggagagaatgaatggcagtcattttaaagatgaaaaggctttggtgaccagtcaaaattcagacttgctggatgatgaagaagttgaagatgaggtgttgttagatgaggaggatgaagacaatgatattactggaaaaacaggaaaggaaccagtgacaagtaatttacatgaaggaaaccctgaggatgactatgaagaaaccagtgccctggagatgagttgcaagacatccccagtgaggtataaagaggaagaatataaaagtggactttctgctctagatcatataaggcacttcacagatagcctcaaaatgaggaaaatggaagataatcaatattctgaagctgagctgtcttcttttagtacttcccatgtgccagaggaacttaagcagccgttacacagaaagtccaaatcgcaggcatatgctatgatgctgtcactgtctgacaaggagtccctccattctacatcccacagttcttccaacgtgtggcacagtatggccagggctgcggcggaatccagtgctatccagtccataagccacgtatgacgttatcaaggttgaccagagtgggaccaagtccaacagtagcatggctctttcatataggactatttacaagactgctgagcagaatgccttataaacctgcagggtcactcatctaaagtctagtgaccttaaactgaatgatttaaaaaagaaaagaaagaaaaaagaaactatttattctcgatattttgttttgcacagcaaaggcagctgctgacttctggaagatcaatcaatgcgacttaaagtgattcagtgaaaacaaaaaacttggtgggctgaaggcatcttccagtttaccccaccttagggtatgggtgggtgagaagggcagttgagatggcagcattgatatgaatgaacactccatagaaactgaattctcttttgtacaagatcacctgacatgattgggaacagttgcttttaattacagatttaatttttttcttcgttaaagttttatgtaatttaaccctttgaagacagaagtagttggatgaaatgcacagtcaattattatagaaactgataacagggagtacttgttcccccttttgccttcttaagtacattgtttaaaactagggaaaaagggtatgtgtatattgtaaactatggatgttaacacttcaaagaggttaagtcagtgargtaacctattcatcaccagtaccgctgtaccactaataaattgtttgccaaatccttgtaataacatcttaattttagacaatcatgtcactgtttttaatgtttatttttttgtgtgtgttgcgtgtatcatgtatttatttgttggcaaactattgtttgttgattaaaatagcactgttccagtcagccactactttatgacgtctgaggcacacccctttccgaatttcaaggaccaaggtgacccgacctgtgtatgagagtgccaaatggtgtttggcttttcttaacattcctttttgtttgtttgttttgttttccttcttaatgaactaaatacgaatagatgcaacttagtttttgtaatactgaaatncgattcaattgtataaacgattataatttctttcatggaagcatgattcttctgattaaaaactgtactccatattttatgctggttgtctgcaagcttgtgcgatgttatgttcatgttaatcctatttgtaaaatgaagtgttcccaaccttatngttaaaagagagaangtaaataacagactgtattcagttattttgccctttattgaggaaccagatttgttttctttttgtttgtaatctcattttngaaataatcagcaagttgaggtactttcttcaaatgctttgtacaatataaactgttatgcctttcagtgcattactatgggaggagcaactaaaaaataaagacttacaaaaaggagtatttttaaagaacaaaaacttgagggggggcccggtacccaattcgccctatagtgagtagtattacaattcactggccgtcgttttacaacgtcgtgactgggaaaaccctgggttacccaacttaatcgtcttn

SEQ ID NO: 77 - protein, 718 aa, Homo sapiens
MKSEDYPHETMAPDIHEERQYRCEDCDQLFESKAELADHQKFPCSTPHSAFSMVEEDFQQKLESENDLQEIHTIQECKECDQVFPDLQSLEKHMLSHTEEREYKCDQCPKAFNWKSNLIRHQMSHDSGKHYECENCAKVFTDPSNLQRHIRSQHVGARAHACPECGKTFATSSGLKQHKHIHSSVKPFISFSQSMYPFPDRDLRSLPLKMEPQSPGEVKKLQKGSSESPFDLTTKRKDEKPLTPVPSKPPVTPATSQDQPLDLSMGSRSRASGTKLTEPRKNHVFGGKKGSNVESRPASDGSLQHARPTPFFMDPIYRVEKRKLTDPLEALKEKYLRPSPGFLFHPQMSAIENMAEKLESFSALKPEASELLQSVPSMFNFRAPPNALPENLLRKGKERYTCRYCGKIFPRSANLTRHLRTHTGEQPYRCKYCDRSFSISSNLQRHVRNIHNKEKPFKCHLCDRCFGQQTNLDRHLKKHENGNMSGTATSSPHSELESTGAILDDKEDAYFTEIRNFIGNSNHGSQSPRNVEERMNGSHFKDEKALVTSQNSDLLDDEEVEDEVLLDEEDEDNDITGKTGKEPVTSNLHEGNPEDDYEETSALEMSCKTSPVRYKEEEYKSGLSALDHIRHFTDSLKMRKMEDNQYSEAELSSFSTSHVPEELKQPLHRKSKSQAYAMMLSLSDKESLHSTSHSSSNVWHSMARAAAESSAIQSISHV

SEQ ID NO: 78 - DNA, 4950 bp, Homo sapiens
  misc_feature (1)...(4950): n = A,T,C or G
nngacccacgcgtccgggtgcggtctggacacgtctccggggtgggtcgtccggccttcgatcttagacgaattttacaatgtgaagttctgcatagatgccagtcaaccagatgttggaagctggctcaagtacattagattcgctggctgttatgatcagcacaaccttgttgcatgccagataaatgatcagatattctatagagtagttgcagacattgcgccgggagaggagcttctgctgttcatgaagagcgaagactatccccatgaaactatggcgccggatatccacgaagaacggcaatatcgctgcgaagactgtgaccagctctttgaatctaaggctgaactagcagatcaccaaaagtttccatgcagtactcctcactcagcattttcaatggttgaagaggactttcagcaaaaactcgaaagcgagaatgatctccaagagatacacacgatccaggagtgtaaggaatgtgaccaagtttttcctgatttgcaaagcctggagaaacacatgctgtcacatactgaagagagggaatacaagtgtgatcagtgtcccaaggcatttaactggaagtccaatttaattcgccaccagatgtcacatgacagtggaaagcactatgaatgtgaaaactgtgccaaggttttcacggaccctagcaaccttcagcggcacattcgctctcagcatgtcggtgcccgggcccatgcatgcccggagtgtggcaaaacgtttgccacttcgtcgggcctcaaacaacacaagcacatccacagcagtgtgaagccctttatctgtgaggtctgccataaatcctatactcagttttcaaacctttgccgtcataagcgcatgcatgctgattgcagaacccaaatcaagtgcaaagactgtggacaaatgttcagcactacgtcttccttaaataaacacaggaggttttgtgagggcaagaaccattttgcggcaggtggattttttggccaaggcatttcacttcctggaaccccagctatggataaaacgtccatggttaatatgagtcatgccaacccgggccttgctgactattttggcgccaataggcatcctgctggtcttacctttccaacagctcctggattttcttttagcttccctggtctgtttccttccggcttgtaccacaggcctcctttgatacctgctagttctcctgttaaaggactatcaagtactgaacagacaaacaaaagtcaaagtcccctcatgacacatcctcagatactgccagctacacaggatattttgaaggcactatctaaacacccatctgtaggggacaataagccagtggagctccagcccgagaggtcctctgaagagaggccctttgagaaaatcagtgaccagtcagagagtagtgaccttgatgatgtcagtacaccaagtggcagtgacctggaaacaacctcgggctctgatctggaaagtgacattgaaagtgataaagagaaatttaaagaaaatggtaaaatgttcaaagacaaagtaagccctcttcagaatctggcttcaataaataataagaaagaatacagcaatcattccattttctcaccatctttagaggagcagactgcggtgtcaggagctgtgaatgattctataaaggctattgcttctattgctgaaaaatactttggttcaacaggactggtggggctgcaagacaaaaaagttggagctttaccttacccttccatgtttcccctcccattttttccagcattctctcaatcaatgtacccatttcctgatagagacttgagatcgttacctttgaaaatggaaccccaatcaccaggtgaagtaaagaaactgcagaagggcagctctgagtccccctttgatctcaccactaagcgaaaggatgagaagcccttgactccagtcccctccaagcctccagtgacacctgccacaagccaagaccagcccctggatctaagtatgggcagtaggagtagagccagtgggacaaagctgactgagcctcgaaaaaaccacgtgtttgggggaaaaaaaggaagcaacgtcgaatcaagacctgcttcagatggttccttgcagcatgcaagacccactcctttctttatggaccctatttacagagtagagaaaagaaaactaactgacccacttgaagctttaaaagagaaatacttgaggccttctccaggattcttgtttcacccacaattccaactgcctgatcagagaacttggatgtcagctattgaaaacatggcagaaaagctagagagcttcagtgccctgaaacctgaggccagtgagctcttacagtcagtgccctctatgttcaacttcagggcgcctcccaatgccctgccagagaaccttctgcggaagggaaaggagcgctatacctgcagatactgtggcaagatttttccaaggtctgcaaacctaacacggcacttgagaacccacacaggagagcagccttacagatgcaaatactgtgacagatcatttagcatatcttctaacttgcaaaggcatgttcgcaacatccacaataaagagaagccatttaagtgtcacttatgtgataggtgttttggtcaacaaaccaatttagacagacacctaaagaaacatgagaatgggaacatgtccggtacagcaacatcgtcgcctcattctgaactggaaagtacaggtgcgattctggatgacaaagaagatgcttacttcacagaaattcgaaatttcattgggaacagcaaccatggcagccaatctcccaggaatgtggaggagagaatgaatggcagtcattttaaagatgaaaaggctttggtgaccagtcaaaattcagacttgctggatgatgaagaagttgaagatgaggtgttgttagatgaggaggatgaagacaatgatattactggaaaaacaggaaaggaaccagtgacaagtaatttacatgaaggaaaccctgaggatgactatgaagaaaccagtgccctggagatgagttgcaagacatccccagtgaggtataaagaggaagaatataaaagtggactttctgctctagatcatataaggcacttcacagatagcctcaaaatgaggaaaatggaagataatcaatattctgaagctgagctgtcttcttttagtacttcccatgtgccagaggaacttaagcagccgttacacagaaagtccaaatcgcaggcatatgctatgatgctgtcactgtctgacaaggagtccctccattctacatcccacagttcttccaacgtgtggcacagtatggccagggctgcggcggaatccagtgctatccagtccataagccacgtatgacgttatcaaggttgaccagagtgggaccaagtccaacagtagcatggctctttcatataggactatttacaagactgctgagcagaatgccttataaacctgcagggtcactcatctaaagtctagtgaccttaaactgaatgatttaaaaaagaaaagaaagaaaaaagaaactatttattctcgatattttgttttgcacagcaaaggcagctgctgacttctggaagatcaatcaatgcgacttaaagtgattcagtgaaaacaaaaaacttggtgggctgaaggcatcttccagtttaccccaccttagggtatgggtgggtgagaagggcagttgagatggcagcattgatatgaatgaacactccatagaaactgaattctcttttgtacaagatcacctgacatgattgggaacagttgcttttaattacagatttaatttttttcttcgttaaagttttatgtaatttaaccctttgaagacagaagtagttggatgaaatgcacagtcaattattatagaaactgataacagggagtacttgttcccccttttgccttcttaagtacattgtttaaaactagggaaaaagggtatgtgtatattgtaaactatggatgttaacacttcaaagaggttaagtcagtgargtaacctattcatcaccagtaccgctgtaccactaataaattgtttgccaaatccttgtaataacatcttaattttagacaatcatgtcactgtttttaatgtttatttttttgtgtgtgttgcgtgtatcatgtatttatttgttggcaaactattgtttgttgattaaaatagcactgttccagtcagccactactttatgacgtctgaggcacacccctttccgaatttcaaggaccaaggtgacccgacctgtgtatgagagtgccaaatggtgtttggcttttcttaacattcctttttgtttgtttgttttgttttccttcttaatgaactaaatacgaatagatgcaacttagtttttgtaatactgaaatncgattcaattgtataaacgattataatttctttcatggaagcatgattcttctgattaaaaactgtactccatattttatgctggttgtctgcaagcttgtgcgatgttatgttcatgttaatcctatttgtaaaatgaagtgttcccaaccttatngttaaaagagagaangtaaataacagactgtattcagttattttgccctttattgaggaaccagatttgttttctttttgtttgtaatctcattttngaaataatcagcaagttgaggtactttcttcaaatgctttgtacaatataaactgttatgcctttcagtgcattactatgggaggagcaactaaaaaataaagacttacaaaaaggagtatttttaaagaacaaaaacttgagggggggcccggtacccaattcgccctatagtgagtagtattacaattcactggccgtcgttttacaacgtcgtgactgggaaaaccctgggttacccaacttaatcgtcttn

SEQ ID NO: 79 - protein, 1051 aa, Homo sapiens
MKSEDYPHETMAPDIHEERQYRCEDCDQLFESKAELADHQKFPCSTPHSAFSMVEEDFQQKLESENDLQEIHTIQECKECDQVFPDLQSLEKHMLSHTEEREYKCDQCPKAFNWKSNLIRHQMSHDSGKHYECENCAKVFTDPSNLQRHIRSQHVGARAHACPECGKTFATSSGLKQHKHIHSSVKPFICEVCHKSYTQFSNLCRHKRMHADCRTQIKCKDCGQMFSTTSSLNKHRRFCEGKNHFAAGGFFGQGISLPGTPAMDKTSMVNMSHANPGLADYFGANRHPAGLTFPTAPGFSFSVPGLFPSGLYHRPPLIPASSPVKGLSSTEQTNKSQSPLMTHPQILPATQDILKALSKHPSVGDNKPVELQPERSSEERPFEKISDQSESSDLDDVSTPSGSDLETTSGSDLESDIESDKEKFKENGKMFKDKVSPLQNLASINNKKEYSNHSIFSPSLEEQTAVSGAVNDSIKAIASIAEKYFGSTGLVGLQDKKVGALPYPSMFPLPFFPAFSQSMYPFPDRDLRSLPLKMEPQSPGEVKKLQKGSSESPFDLTTKRKDEKPLTPVPSKPPVTPATSQDQPLDLSMGSRSRASGTKLTEPRKNHVFGGKKGSNVESRPASDGSLQHARPTPFFMDPIYRVEKRKLTDPLEALKEKYLRPSPGFLFHPQFQLPDQRTWMSAIENMAEKLESFSALKPEASELLQSVPSMFNFRAPPNALPENLLRKGKERYTCRYCGKIFPRSANLTRHLRTHTGEQPYRCKYCDRSFSISSNLQRHVRNIHNKEKPFKCHLCYRCFGQQTNLDRHLKKHENGNMSGTATSSPHSELESTGAILDDKEDAYFTEIRNFIGNSNHGSQSPRNVEERMNGSHFKEEKALVPSQNSDLLDDEEVEDEVLLDEEDEDYDITGKTGKEPVTSNLHEGNPEDDYEETSALEMSCKTSPVRYKEEEYKSGLSALDHIRHFTDSLKMRKMEDNQYSEAELSSFSTSHVPEELKQPLHRKSKSQAYAMMLSLSDKESLHSTSHSSSNVWHSMARAAAESSAIQSISHV

SEQ ID NO: 80 - DNA, 3978 bp, Homo sapiens
  misc_feature (1)...(3978): n = A,T,C or G
nngacccacgcgtccgggtgcggtctggacacgtctccggggtgggtcgtccggccttcgatcttagacgaattttacaatgtgaagttctgcatagatgccagtcaaccagatgttggaagctggctcaagtacattagattcgctggctgttatgatcagcacaaccttgttgcatgccagataaatgatcagatattctatagagtagttgcagacattgcgccgggagaggagcttctgctgttcatgaagagcgaagactatccccatgaaactatggcgccggatatccacgaagaacggcaatatcgctgcgaagactgtgaccagctctttgaatctaaggctgaactagcagatcaccaaaagtttccatgcagtactcctcactcagcattttcaatggttgaagaggactttcagcaaaaactcgaaagcgagaatgatctccaagagatacacacgatccaggagtgtaaggaatgtgaccaagtttttcctgatttgcaaagcctggagaaacacatgctgtcacatactgaagagagggaatacaagtgtgatcagtgtcccaaggcatttaactggaagtccaatttaattcgccaccagatgtcacatgacagtggaaagcactatgaatgtgaaaactgtgccaaggttttcacggaccctagcaaccttcagcggcacattcgctctcagcatgtcggtgcccgggcccatgcatgcccggagtgtggcaaaacgtttgccacttcgtcgggcctcaaacaacacaagcacatccacagcagtgtgaagccctttatctcattctctcaatcaatgtacccatttcctgatagagacttgagatcgttacctttgaaaatggaaccccaatcaccaggtgaagtaaagaaactgcagaagggcagctctgagtccccctttgatctcaccactaagcgaaaggatgagaagcccttgactccagtcccctccaagcctccagtgacacctgccacaagccaagaccagcccctggatctaagtatgggcagtaggagtagagccagtgggacaaagctgactgagcctcgaaaaaaccacgtgtttgggggaaaaaaaggaagcaacgtcgaatcaagacctgcttcagatggttccttgcagcatgcaagacccactcctttctttatggaccctatttacagagtagagaaaagaaaactaactgacccacttgaagctttaaaagagaaatacttgaggccttctccaggattcttgtttcacccacaattccaactgcctgatcagagaacttggatgtcagctattgaaaacatggcagaaaagctagagagcttcagtgccctgaaacctgaggccagtgagctcttacagtcagtgccctctatgttcaacttcagggcgcctcccaatgccctgccagagaaccttctgcggaagggaaaggagcgctatacctgcagatactgtggcaagatttttccaaggtctgcaaacctaacacggcacttgagaacccacacaggagagcagccttacagatgcaaatactgtgacagatcatttagcatatcttctaacttgcaaaggcatgttcgcaacatccacaataaagagaagccatttaagtgtcacttatgtgataggtgttttggtcaacaaaccaatttagacagacacctaaagaaacatgagaatgggaacatgtccggtacagcaacatcgtcgcctcattctgaactggaaagtacaggtgcgattctggatgacaaagaagatgcttacttcacagaaattcgaaatttcattgggaacagcaaccatggcagccaatctcccaggaatgtggaggagagaatgaatggcagtcattttaaagatgaaaaggctttggtgaccagtcaaaattcagacttgctggatgatgaagaagttgaagatgaggtgttgttagatgaggaggatgaagacaatgatattactggaaaaacaggaaaggaaccagtgacaagtaatttacatgaaggaaaccctgaggatgactatgaagaaaccagtgccctggagatgagttgcaagacatccccagtgaggtataaagaggaagaatataaaagtggactttctgctctagatcatataaggcacttcacagatagcctcaaaatgaggaaaatggaagataatcaatattctgaagctgagctgtcttcttttagtacttcccatgtgccagaggaacttaagcagccgttacacagaaagtccaaatcgcaggcatatgctatgatgctgtcactgtctgacaaggagtccctccattctacatcccacagttcttccaacgtgtggcacagtatggccagggctgcggcggaatccagtgctatccagtccataagccacgtatgacgttatcaaggttgaccagagtgggaccaagtccaacagtagcatggctctttcatataggactatttacaagactgctgagcagaatgccttataaacctgcagggtcactcatctaaagtctagtgaccttaaactgaatgatttaaaaaagaaaagaaagaaaaaagaaactatttattctcgatattttgttttgcacagcaaaggcagctgctgacttctggaagatcaatcaatgcgacttaaagtgattcagtgaaaacaaaaaacttggtgggctgaaggcatcttccagtttaccccaccttagggtatgggtgggtgagaagggcagttgagatggcagcattgatatgaatgaacactccatagaaactgaattctcttttgtacaagatcacctgacatgattgggaacagttgcttttaattacagatttaatttttttcttcgttaaagttttatgtaatttaaccctttgaagacagaagtagttggatgaaatgcacagtcaattattatagaaactgataacagggagtacttgttcccccttttgccttcttaagtacattgtttaaaactagggaaaaagggtatgtgtatattgtaaactatggatgttaacacttcaaagaggttaagtcagtgargtaacctattcatcaccagtaccgctgtaccactaataaattgtttgccaaatccttgtaataacatcttaattttagacaatcatgtcactgtttttaatgtttatttttttgtgtgtgttgcgtgtatcatgtatttatttgttggcaaactattgtttgttgattaaaatagcactgttccagtcagccactactttatgacgtctgaggcacacccctttccgaatttcaaggaccaaggtgacccgacctgtgtatgagagtgccaaatggtgtttggcttttcttaacattcctttttgtttgtttgttttgttttccttcttaatgaactaaatacgaatagatgcaacttagtttttgtaatactgaaatncgattcaattgtataaacgattataatttctttcatggaagcatgattcttctgattaaaaactgtactccatattttatgctggttgtctgcaagcttgtgcgatgttatgttcatgttaatcctatttgtaaaatgaagtgttcccaaccttatngttaaaagagagaangtaaataacagactgtattcagttattttgccctttattgaggaaccagatttgttttctttttgtttgtaatctcattttngaaataatcagcaagttgaggtactttcttcaaatgctttgtacaatataaactgttatgcctttcagtgcattactatgggaggagcaactaaaaaataaagacttacaaaaaggagtatttttaaagaacaaaaacttgagggggggcccggtacccaattcgccctatagtgagtagtattacaattcactggccgtcgttttacaacgtcgtgactgggaaaaccctgggttacccaacttaatcgtcttn

SEQ ID NO: 81 - protein, 727 aa, Homo sapiens [sequence omitted]

SEQ ID NO: 82 - DNA, 4923 bp, Homo sapiens
  misc_feature (1)...(4923): n = A,T,C or G
nngacccacgcgtccgggtgcggtctggacacgtctccggggtgggtcgtccggccttcgatcttagacgaattttacaatgtgaagttctgcatagatgccagtcaaccagatgttggaagctggctcaagtacattagattcgctggctgttatgatcagcacaaccttgttgcatgccagataaatgatcagatattctatagagtagttgcagacattgcgccgggagaggagcttctgctgttcatgaagagcgaagactatccccatgaaactatggcgccggatatccacgaagaacggcaatatcgctgcgaagactgtgaccagctctttgaatctaaggctgaactagcagatcaccaaaagtttccatgcagtactcctcactcagcattttcaatggttgaagaggactttcagcaaaaactcgaaagcgagaatgatctccaagagatacacacgatccaggagtgtaaggaatgtgaccaagtttttcctgatttgcaaagcctggagaaacacatgctgtcacatactgaagagagggaatacaagtgtgatcagtgtcccaaggcatttaactggaagtccaatttaattcgccaccagatgtcacatgacagtggaaagcactatgaatgtgaaaactgtgccaaggttttcacggaccctagcaaccttcagcggcacattcgctctcagcatgtcggtgcccgggcccatgcatgcccggagtgtggcaaaacgtttgccacttcgtcgggcctcaaacaacacaagcacatccacagcagtgtgaagccctttatctgtgaggtctgccataaatcctatactcagttttcaaacctttgccgtcataagcgcatgcatgctgattgcagaacccaaatcaagtgcaaagactgtggacaaatgttcagcactacgtcttccttaaataaacacaggaggttttgtgagggcaagaaccattttgcggcaggtggattttttggccaaggcatttcacttcctggaaccccagctatggataaaacgtccatggttaatatgagtcatgccaacccgggccttgctgactattttggcgccaataggcatcctgctggtcttacctttccaacagctcctggattttcttttagcttccctggtctgtttccttccggcttgtaccacaggcctcctttgatacctgctagttctcctgttaaaggactatcaagtactgaacagacaaacaaaagtcaaagtcccctcatgacacatcctcagatactgccagctacacaggatattttgaaggcactatctaaacacccatctgtaggggacaataagccagtggagctccagcccgagaggtcctctgaagagaggccctttgagaaaatcagtgaccagtcagagagtagtgaccttgatgatgtcagtacaccaagtggcagtgacctggaaacaacctcgggctctgatctggaaagtgacattgaaagtgataaagagaaatttaaagaaaatggtaaaatgttcaaagacaaagtaagccctcttcagaatctggcttcaataaataataagaaagaatacagcaatcattccattttctcaccatctttagaggagcagactgcggtgtcaggagctgtgaatgattctataaaggctattgcttctattgctgaaaaatactttggttcaacaggactggtggggctgcaagacaaaaaagttggagctttaccttacccttccatgtttcccctcccattttttccagcattctctcaatcaatgtacccatttcctgatagagacttgagatcgttacctttgaaaatggaaccccaatcaccaggtgaagtaaagaaactgcagaagggcagctctgagtccccctttgatctcaccactaagcgaaaggatgagaagcccttgactccagtcccctccaagcctccagtgacacctgccacaagccaagaccagcccctggatctaagtatgggcagtaggagtagagccagtgggacaaagctgactgagcctcgaaaaaaccacgtgtttgggggaaaaaaaggaagcaacgtcgaatcaagacctgcttcagatggttccttgcagcatgcaagacccactcctttctttatggaccctatttacagagtagagaaaagaaaactaactgacccacttgaagctttaaaagagaaatacttgaggccttctccaggattcttgtttcacccacaaatgtcagctattgaaaacatggcagaaaagctagagagcttcagtgccctgaaacctgaggccagtgagctcttacagtcagtgccctctatgttcaacttcagggcgcctcccaatgccctgccagagaaccttctgcggaagggaaaggagcgctatacctgcagatactgtggcaagatttttccaaggtctgcaaacctaacacggcacttgagaacccacacaggagagcagccttacagatgcaaatactgtgacagatcatttagcatatcttctaacttgcaaaggcatgttcgcaacatccacaataaagagaagccatttaagtgtcacttatgtgataggtgttttggtcaacaaaccaatttagacagacacctaaagaaacatgagaatgggaacatgtccggtacagcaacatcgtcgcctcattctgaactggaaagtacaggtgcgattctggatgacaaagaagatgcttacttcacagaaattcgaaatttcattgggaacagcaaccatggcagccaatctcccaggaatgtggaggagagaatgaatggcagtcattttaaagatgaaaaggctttggtgaccagtcaaaattcagacttgctggatgatgaagaagttgaagatgaggtgttgttagatgaggaggatgaagacaatgatattactggaaaaacaggaaaggaaccagtgacaagtaatttacatgaaggaaaccctgaggatgactatgaagaaaccagtgccctggagatgagttgcaagacatccccagtgaggtataaagaggaagaatataaaagtggactttctgctctagatcatataaggcacttcacagatagcctcaaaatgaggaaaatggaagataatcaatattctgaagctgagctgtcttcttttagtacttcccatgtgccagaggaacttaagcagccgttacacagaaagtccaaatcgcaggcatatgctatgatgctgtcactgtctgacaaggagtccctccattctacatcccacagttcttccaacgtgtggcacagtatggccagggctgcggcggaatccagtgctatccagtccataagccacgtatgacgttatcaaggttgaccagagtgggaccaagtccaacagtagcatggctctttcatataggactatttacaagactgctgagcagaatgccttataaacctgcagggtcactcatctaaagtctagtgaccttaaactgaatgatttaaaaaagaaaagaaagaaaaaagaaactatttattctcgatattttgttttgcacagcaaaggcagctgctgacttctggaagatcaatcaatgcgacttaaagtgattcagtgaaaacaaaaaacttggtgggctgaaggcatcttccagtttaccccaccttagggtatgggtgggtgagaagggcagttgagatggcagcattgatatgaatgaacactccatagaaactgaattctcttttgtacaagatcacctgacatgattgggaacagttgcttttaattacagatttaatttttttcttcgttaaagttttatgtaatttaaccctttgaagacagaagtagttggatgaaatgcacagtcaattattatagaaactgataacagggagtacttgttcccccttttgccttcttaagtacattgtttaaaactagggaaaaagggtatgtgtatattgtaaactatggatgttaacacttcaaagaggttaagtcagtgargtaacctattcatcaccagtaccgctgtaccactaataaattgtttgccaaatccttgtaataacatcttaattttagacaatcatgtcactgtttttaatgtttatttttttgtgtgtgttgcgtgtatcatgtatttatttgttggcaaactattgtttgttgattaaaatagcactgttccagtcagccactactttatgacgtctgaggcacacccctttccgaatttcaaggaccaaggtgacccgacctgtgtatgagagtgccaaatggtgtttggcttttcttaacattcctttttgtttgtttgttttgttttccttcttaatgaactaaatacgaatagatgcaacttagtttttgtaatactgaaatncgattcaattgtataaacgattataatttctttcatggaagcatgattcttctgattaaaaactgtactccatattttatgctggttgtctgcaagcttgtgcgatgttatgttcatgttaatcctatttgtaaaatgaagtgttcccaaccttatngttaaaagagagaangtaaataacagactgtattcagttattttgccctttattgaggaaccagatttgttttctttttgtttgtaatctcattttngaaataatcagcaagttgaggtactttcttcaaatgctttgtacaatataaactgttatgcctttcagtgcattactatgggaggagcaactaaaaaataaagacttacaaaaaggagtatttttaaagaacaaaaacttgagggggggcccggtacccaattcgccctatagtgagtagtattacaattcactggccgtcgttttacaacgtcgtgactgggaaaaccctgggttacccaacttaatcgtcttn

SEQ ID NO: 83 - protein, 1042 aa, Homo sapiens
MKSEDYPHETMAPDIHEERQYRCEDCDQLFESKAELADHQKFPCSTPHSAFSMVEEDFQQKLESENDLQEIHTIQECKECDQVFPDLQSLEKHMLSHTEEREYKCDQCPKAFNWKSNLIRHQMSHDSGKHYECENCAKVFTDPSNLQRHIRSQHVGARAHACPECGKTFATSSGLKQHKHIHSSVKPFICEVCHKSYTQFSNLCRHKRMHADCRTQIKCKDCGQMFSTTSSLNKHRRFCEGKNHFAAGGFFGQGISLPGTPAMDKTSMVNMSHANPGLADYFGANRHPAGLTFPTAPGFSFSFPGLFPSGLYHRPPLIPASSPVKGLSSTEQTNKSQSPLMTHPQILPATQDILKALSKHPSVGDNKPVELQPERSSEERPFEKISDQSESSDLDDVSTPSGSDLETTSGSDLESDIESDKEKFKENGKMFKDKVSPLQNLASINNKKEYSNHSIFSPSLEEQTAVSGAVNDSIKAIASIAEKYFGSTGLVGLQDKKVGALPYPSMFPLPFFPAFSQSMYPFPDRDLRSLPLKMEPQSPGEVKKLQKGSSESPFDLTTKRKDEKPLTPVPSKPPVTPATSQDQPLDLSMGSRSRASGTKLTEPRKNHVFGGKKGSNVESRPASDGSLQHARPTPFFMDPIYRVEKRKLTDPLEALKEKYLRPSPGFLFHPQMSAIENMAEKLESFSALKPEASELLQSVPSMFNFRAPPNALPENLLRKGKERYTCRYCGKIFPRSANLTRHLRTHTGEQPYRCKYCDRSFSISSNLQRHVRNIHNKEKPFKCHLCDRCFGQQTNLDRHLKKHENGNMSGTATSSPHSELESTGAILDDKEDAYFTEIRNFIGNSNHGSQSPRNVEERMNGSHFKDEKALVTSQNSDLLDDEEVEDEVLLDEEDEDNDITGKTGKEPVTSNLHEGNPEDDYEETSALEMSCKTSPVRYKEEEYKSGLSALDHIRHFTDSLKMRKMEDNQYSEAELSSFSTSHVPEELKQPLHRKSKSQAYAMMLSLSDKESLHSTSHSSSNVWHSMARAAAESSAIQSISHV

SEQ ID NO: 84 - DNA, 4039 bp, Homo sapiens
cgccatcgttccctggctgcttactaagttggatccggaatttcttttcaaccgggagccattggtgtcgaagtgtctgcaatgaaccccgtgaatgctactgctctctacatttccgcgagccgcctagtgctcaactacgaccccggagaccccaaggcgtttactgagattaacaggctcttgccttacttccgacagtccctttcgtgctgtgtttgcggacatttgctacaagatcctattgcacccaccaactccacctgccaacattatgtctgcaaaacttgtaaaggcaagaaaatgatgatgaaaccttcctgtagctggtgcaaagactatgagcagtttgaggaaaacaagcagttaagcatcctagtgaactgctacaaaaaactatgcgagtatataacacagactacactggcacgggatataatagaagcagttgactgttcttctgatattttggctttgcttaatgatggatcattgttttgtgaggagacagaaaaaccctcagattcatcctttactttgtgtttgacacattcccctttaccttcaacctcagaacccacaactgatcctcaagctagtttatctccaatgtctgaaagcaccctcagcattgctattggcagttctgttatcaatggtttgcctacttataatgggctttcaatagatagatttggtataaatattccttcacctgaacattcaaatacgattgacgtatgtaatactgttgacataaaaactgaggatctgtctgacagcctgccacccgtttgtgacacagtagccactgacttatgttccacaggcattgatatctgcagtttcagtgaagatataaaacctggagactctctgttactgagtgttgaggaagtactccgcagcttagaaactgtttcaaatacagaggtctgttgccctaatttgcagccgaacttggaagccactgtatccaatggaccttttctgcagctttcttcccagtctcttagccataatgtttttatgtccaccagtcctgcacttcatgggttatcatgtacagcagcaactccgaagatagcaaaattgaatagaaaacgatccagatcagagagtgacagtgagaaagttcagccacttccaatttctaccattatccgaggcccaacactgggggcatctgctcctgtgacagtgaaacgggagagcaaaatttctcttcaacctatagcaactgttcccaatggaggcacaacacctaaaatcagcaaaactgtacttttatctactaaaagcatgaaaaagagtcatgaacatggatccaagaaatctcactctaaaaccaagccaggtattcttaaaaaagacaaagcagtaaaggaaaagattcctagtcatcattttatgccaggaagtcctaccaagactgtgtacaaaaaaccccaggaaaagaaagggtgtaaatgtgggcgtgctactcaaaatccaagtgttcttacatgccgaggccaacgctgcccttgctactctaaccgcaaagcctgcttagattgtatatgtcgtggctgccaaaactcctatatggccaatggggagaagaagctggaggcatttgccgtgccagaaaaggccttggagcagaccaggctcactttgggcattaacgtgactagcattgctgtgcgtaacgctagtaccagcaccagtgtaataaatgtcacagggtccccagtaacgacgtttttagctgccagtacacatgatgataaaagtttggatgaagctatagacatgagattcgactgttaaatcagtgggtcttttaaacctactcctggtagggaaatagctacagttttacggcagctatggttctgttggtttaacttgccggagctcctgcatatagatcacttgtatcaagtgttttcattgctaagttatatgtgttagtgtcggggaaatagtttgcagataatggaggagtaaccctacaactatatgtccttagttcttacagaacctcatagtttgagaacaaagctgatgcaactgatttatacaaaatgaactttggcaagaaaaataacattaacctcattgtttatggccatgctttgtgcataatcaaagtttatgattaaatgtaaggaagtggtatctagtcagtccataaagattgtgctaatttttttgtggaaaagtagccattagttcaggaaactcagtgctgccttcagatgtcattgatgtttctcctgttggaaagctgatgtgtccagctcaacctttgtgctgacatcataccatttctgatcatgaaatattggctactggtgtatgtagcagttcttaaatcagcagtattatgaaaaaaaattccccctcattagaatgtttaagaaatctttttaaaaagtaaaattctgtcagactacaaatgtttagctgttactcatttctagggaagaaattctaaatccctccttcactttgagcagtgttctaattggataaatgaaggagagtagttttattctgaaggtaattaaatttagactatgtagtatgtgacagaatttttttaaaattataaaaagattttatttagtaattgggatttacttaaaataattttggaataatgctcccagacttgcccagatttgtgtattgtacttattgccactggccgccactttgacttattttctctaatagtttatttgccacagtctttattttgaatatgctcctagtttttttttagggtgctgttcattatgaaggcttctttatagaggcctaataagaatgcctttttataaagcctgtgcatttaggtaggttgaagctaggaggattttctttagaatgctcttttgcatgtaaagcacaaagtatgtttcagtttaaatgcacttcttccggttaatttttatggggaagacaagtgagtcacaaacattctgttgaagggaaatctagtcagttgcttgaaagagcacagcccaaataaaacaaggactgactaggtgtaatgaaataacctgtgatttaaaagaagagctgcagctttgacagtgcttatttaaagaaaaatactgctggaaaatttccaatttctactacgttcaccatctctagtaagatctgacatatgctgaagttatgttttgatttggcacacagcatgttcaatgatggttactcgcctagtacaagacatggagaagaaacctttggacacagagcagatgacacctccttctgttttgtagtgtatcctggtgtcattttctgtgaatgtggtcaggtagagttgtttttgttgttgttgttgggcttttttttctttttttttttttggtctcttttggtggggtgggggtgggctaaagccataggaagaaaaatgtgatgtgtccagtatgtactattttgtttttgttttgcaagaagagttgaactatttttgataacaagagtaaatggtggaaaatgcttcttagttgtcttgtctttatttgctttccaagatttggaattttatttaattcctttaagtgttagcagtgtcttatgaaacatgtatttacctaacgtttgtaacagttttgtgttgaacccagatgccctgctatataaagttgtaaatctgttctttattcactaatgatcactgcaaaaatgattagaaatgagattgtacacatggatgaggatatattttgcaaatcgaccaaactttcctaatattatgatcttaaaattcatagagtactttattgcttcccaagtttgataatcttgtgggttttttttttttttgatgcatgggaggttggcaatatagacaaagtggaaatcattagtatgtgagggccttgattgttatgtaatattgccaatgatgaattcaggttgtttttagcacaagtttctcttttttatgctggtattctcactgccacatttttggaaacctgtattacaccttaaatctatcaataaatgatagttttctaattct

SEQ ID NO: 85 - protein, 595 aa, Homo sapiens
VGSGISFQPGAIGVEVSAMNPVNATALYISASRLVLNYDPGDPKAFTEINRLLPYFRQSLSCCVCGHLLQDPIAPTNSTCQHYVCKTCKGKKMMMKPSCSWCKDYEQFEENKQLSILVNCYKKLCEYITQTTLARDIIEAVDCSSDILALLNDGSLFCEETEKPSDSSFTLCLTHSPLPSTSEPTTDPQASLSPMSESTLSIAIGSSVINGLPTYNGLSIDRFGINIPSPEHSNTIDVCNTVDIKTEDLSDSLPPVCDTVATDLCSTGIDICSFSEDIKPGDSLLLSVEEVLRSLETVSNTEVCCPNLQPNLEATVSNGPFLQLSSQSLSHNVFMSTSPALHGLSCTAATPKIAKLNRKRSRSESDSEKVQPLPISTIIRGPTLGASAPVTVKRESKISLQPIATVPNGGTTPKISKTVLLSTKSMKKSHEHGSKKSHSKTKPGILKKDKAVKEKIPSHHFMPGSPTKTVYKKPQEKKGCKCGRATQNPSVLTCRGQRCPCYSNRKACLDCICRGCQNSYMANGEKKLEAFAVPEKALEQTRLTLGINVTSIAVRNASTSTSVINVTGSPVTTFLAASTHDDKSLDEAIDMRFDC

SEQ ID NO: 86 - DNA, 1385 bp, Homo sapiens
acttagtatgcttacccgcagagtggaggactagctgtatgcccagttccaaaatgaaggagatgagctcgttatttccagaagactggtaccaatttgttctaaggcagttggaatgttatcattcagaagagaaggcctcaaatgtactggaagaaattgccaaggacaaagttttaaaagacttttatgttcatacagtaatgacttgttattttagtttatttggaatagacaatatggctcctagtcctggtcatatattgagagtttacggtggtgttttgccttggtctgttgctttggactggctcacagaaaagccagaactgtttcaactagcactgaaagcattcaggtatactctgaaactaatgattgataaagcaagtttaggtccaatagaagactttagagaactgattaagtaccttgaagaatatgaacgtgactggtacattggtttggtatctgatgaaaagtggaaggaagcaattttacaagaaaagccatacttgttttctctggggtatgattctaatatgggaatttacactgggagagtgcttagccttcaagaattattgatccaagtgggaaagttaaatcctgaagctgttagaggtcagtgggccaatctttcatgggaattactttatgccacaaacgatgatgaagaacgttatagtatacaagctcatccactacttttaagaaatcttacggtacaagcagcagaacctcccctgggatatccgatttattcttcaaaacctctccacatacatttgtattagagctcattttgactgtaatgtcatcaaatgcaatgtttttattttttcatcctaaaaaagtaactgtgattcttgtaacttgaggacttctccacacccccattcagatgcctgagaacagctaagctccgtaaagttggttctcttagccatcttaatggttctaaaaaacagcaaaaacatctttatgtctaagataaaagaactatttggccaatatttgtgccctctggactttagtaggctttggtaaatgtgagaaaacttttgtagaattatcatataatgaattttgtaatgctttcttaaatgtgttataggtgaattgccatacaaagttaacagctatgtaatttttacatacttaagagataaacatatcagtgttctaagtagtgataatggatcctgttgaaggttaacataatgtgtatatatttgtttgaaatataatttatagtattttcaaatgtgctgatttattttgacatctaatatctgaatgtttttgtatcaagtagtttgttttcatagacttcaattcataaactttaaaaaacttttaataaaatattttccttccttttc

SEQ ID NO: 87 - protein, 252 aa, Homo sapiens
MPSSKMKEMSSLFPEDWYQFVLRQLECYHSEEKASNVLEEIAKDKVLKDFYVHTVMTCYFSLFGIDNMAPSPGHILRVYGGVLPWSVALDWLTEKPELFQLALKAFRYTLKLMIDKASLGPIEDFRELIKYLEEYERDWYIGLVSDEKWKEAILQEKPYLFSLGYDSNMGIYTGRVLSLQELLIQVGKLNPEAVRGQWANLSWELLYATNDDEERYSIQAHPLLLRNLTVQAAEPPLGYPIYSSKPLHIHLY

SEQ ID NO: 88 - DNA, 4660 bp, Homo sapiens
acaactatttggccctgagaagtcgttctggacgctccatcatcaatgggaactgggcaattgatcgaccaggaaaatacgagggcggagggaccatgttcacctacaagcgtccaaatgagatttcgagcactgccggagagtcctttttggcggaaggtcccaccaacgagatcttggatgtctacatgatacaccagcagccaaacccaggcgtgcactacgagtacgtgatcatggggaccaacgccatcagcccccaggtgccaccccacaggagaccaggggaacccttcaatggccagatggtgacagaaggcaggagccaggaggagggagaacagaaagggaggaacgaggagaaggaagacttgcgtggggaggcccctgagatgttcacctcagaatcggcacagaccttcccagtcaggcatccagacagattttctccccatcgaccggacaacttggtgccaccagcaccgcagcccccacggcgcagccgggatcacaactggaagcagcttgggacaacagaatgttccacgacctgtgggaaaggatcgcagtaccctattttccgctgtgtgcacagaagcactcatgaagaggctcctgagagttactgtgactccagcatgaagccgacccccgaggaggagccctgcaacatcttcccttgcccagccttctgggacatcggggagtggtctgagtgcagcaagacctgtggcctgggcatgcagcaccgccaggttctgtgccgccaggtgtacgccaaccgcagcctgacggtgcagccctaccgctgccagcacctggagaaacctgagaccaccagcacctgccaactcaagatctgcagcgagtggcagatccggaccgactggacctcgtgctcggtgccctgcggcgtgggacagaggacccgtgatgtgaagtgtgtgagcaacattggggatgtggttgacgatgaggaatgcaacatgaagctccggccgaatgacattgagaactgcgacatgggaccctgtgccaagagctggttcctcaccgagtggagcgaaaggagctcagcggagtgtggggccggagtgcggacacgctcggtggtgtgcatgaccaaccatgtcagcagcctgcccctggagggctgtgggaacaaccggccggcagaggccaccccatgtgacaacggaccctgcacgggcaaggtggagtggtttgccgggagctggagtcagtgttccatcgagtgtgggagcgggacgcaacagagggaggtgatttgtgttagaaagaatgcagacacctttgaagtgttggacccctctgaatgttctttcctggagaaaccccccagccagcaatcctgccacctcaagccttgcggagccaaatggtttagcaccgaatggagcatgtgttccaagagctgccagggtggctttcgggtccgggaagtgcggtgtctgtctgatgacatgactctaagtaacctctgtgaccctcagttgaaaccagaagagagagaatcttgtaaccctcaggactgtgtccctgaagttgatgaaaactgcaaggacaagtactacaactgcaacgtggtggtccaggcaagactctgtgtctacaactactacaagaccgcctgctgtgcctcctgcacccgtgtggccaacaggcagacgggcttcctggggagcagataacactcctgcacccccatcagtagggcagcatcactgccttcccgggggcttcagcagtgcgcctggctggctgctgctccaccacgggccccctggcccaggcgctgccaaccaacttagtcaccacccctgcctccggtgaatgcaccccgtagtacccaggggctttttacacaagatgtttgaaagccacagtcagtcctttaagcatcaccatgtactgatgatcccctccttggacctggcatctgctaatggtgccctttgaaagtcaagcagtgggaagtacatggagctctcagccctgctcccatctggcaccttcaagtcagcagatgggccactgacagagcactgccccatccctggtgctactggtctttctaaacttagcaccctggagagtccaaggaggcagcgcccccaacccagcgccccactaagccttgctgacacgcgtgcatccctctgtgacctcagcccagatgtgcctgttttcattctcaaagacattagactgttttcctgccctatgacacagatagctcacatgaatattgtgctttatttagcaggtgtactcacagatactagctccttagcagctcacaacatcccagaatgggaggcagggggtgactcattatccccattttactgacagggaaactgaggctcaacttaagtaattgacctgccaggtatattcacccatccagtggaagagctgagtccccgccccagtcatctaccagtatccagcatggggcctgtacttagatgtgaaaggtgctgcttcatttctgaccaagagactgagaagtttcccagaatgcaaacaaagcccaggcccctgaaatctttccggtcaagcctttatcccagcactcagttgttttggatgtctgttcctacttgcccttacccccaaagttacagatcctagttacaggactctgccagctttgttaaactgtccgtgagacaagaaagccattggggaaaccaggtgattgcctgaaattcttactccgttccaagtgctgttcctcccaggaaatcaaaggccagggtccttatggccgtggagccttcccgaccacagagccaacttgtgaagcacacagctctgcagcctgggctctgccctgcctcagccgcctcccccacgctcttcaccacgttcctggagagtccggccaacctgtcccagccaaaacactgctgtattagaaaaagtctctttctggtctttctggttttgtttatgaatttccctctgtggccacaaattcctcccctcccccatgactcacagtccatatggcccacccccagacttgagcaccaagctctgcattaatgcagttggcctgcgacaaggagctgtggacccttccccatctcttccaattcactttccccaactatccagttccagaggccgcaggcctggaaggatgcagtgcatattgaaaggtggaccctctgaaaacagttaagaggaatatatgtatgttttgcccattaagaaaacaatggcaagctaaacaaatgttaaacttacagaaaattagtcttatggtcctgagcatatttcccttttagagcaagcctggattcttagcaaagtgtttcccccattgctcttttagctgacaaatctgccactgtgatgatggtttgcagcttttggaagcagtatggcaacctggcctgacatgctctttaggcttccactaacctggggctttcagaaattctatttggcctttctgtgggtagctttccagcttctcttctagggagccccaggcatcatttcccaaaagcatccccatctcctgattctcttggaactcctacagataagcatcctggcagaggcccaggctcccaaaccgacaaagtgaaaagagaccagagaggccaagcatattgactggtgctgttcagggcctgctcttttccactcaccacttgttttgctgcttgtcacgaggagagttgttcctgtatgtggctgctctcagatctttccaagcaagccagtcatttgaagaggttttcttttcatgctggagggcaggctaagatcaatgagtggaagagagaaaggctgttttagctcaagttaaaggaacaccttctagccatcaaagccgcccaacagaggcaagggccaccacacatgagagagcgctctgtccttaaagggaattctctgttgagtgggaggtgaacaccctggttcttccaactcaggaattctcgtggctgggctgggtcagtgatggctttgtctctttatgtctaaagtgccctatggctgctgaaggttacctaaccattctttaaaaggagaatgaccctccatgggaatggccagcctgccaactgtgcaattgaagaagacccgatggatcaaccccatgtctcccttggggagaaagtgcataaaccaggggtctctttttttttttttcaacaaaccattgagctgttcttggagttcatctctggagaggttatacattattagaagtttgattattattatagtttgatcaatttatttgtcttagagatccaatttttactaattccctagttttttatttcagcatctgaatgtctttctccctagcacagtgcatacaatcagggccttgggtatttccagtgataactttccttggagaggatctaagaaaagcccagatttcggtagccatctccctccaaatatgtctctttctgctttcttagtgcccattatttccccttctcctttcttctgtcactgccatctccttctgtggtcttcccattgttctttaactggccgtaatgtggaattgatatttacattttgatacggtttttttcttggcctgtgtacgggatggcctcatttcctgctctgaattttaaaattagatatttaa

SEQ ID NO: 89 - protein, 538 aa, Homo sapiens
MFTYKRPNEISSTAGESFLAEGPTNEILDVYMIHQQPNPGVHYEYVIMGTNAISPQVPPHRRPGEPFNGQMVTEGRSQEEGEQKGRNEEKEDLRGEAPEMFTSESAQTFPVRHPDRFSPHRPDNLVPPAPQPPRRSRDHNWKQLGTTECSTTCGKGSQYPIFRCVHRSTHEEAPESYCDSSMKPTPEEEPCNIFPCPAFWDIGEWSECSKTCGLGMQHRQVLCRQVYANRSLTVQPYRCQHLEKPETTSTCQLKICSEWQIRTDWTSCSVPCGVGQRTRDVKCVSNIGDVVDDEECNMKLRPNDIENCDMGPCAKSWFLTEWSERSSAECGAGVRTRSVVCMTNHVSSLPLEGCGNNRPAEATPCDNGPCTGKVEWFAGSWSQCSIECGSGTQQREVICVRKNADTFEVLDPSECSFLEKPPSQQSCHLKPCGAKWFSTEWSMCSKSCQGGFRVREVRCLSDDMTLSNLCDPQLKPEERESCNPQDCVPEVDENCKDKYYNCNVVVQARLCVYNYYKTACCASCTRVANRQTGFLGSR

SEQ ID NO: 90 - DNA, 4793 bp, Homo sapiens
attggatcaaacatgtcacaagagtcggacaataataaaagactagtggccttagtgcccatgcccagtgaccctccattcaatacccgaagagcctacaccagtgaggatgaagcctggaagtcatacttggagaatcccctgacagcagccaccaaggccatgatgatcattaatggtgatgaggacagtgctgctgccctcggcctgctctatgactactacaaggttcctcgagacaagaggctgctgtctgtaagcaaagcaagtgacagccaagaagaccaggagaaaagaaactgccttggcaccagtgaagcccagagtaatttgagtggaggagaaaaccgagtgcaagtcctaaagactgttccagtgaacctttccctaaatcaagatcacctggagaattccaagcgggaacagtacagcatcagcttccccgagagctctgccatcatcccggtgtcgggaatcacggtggtgaaagctgaagatttcacaccagttttcatggccccacctgtgcactatccccggggagatggggaagagcaacgagtggttatctttgaacagactcagtatgacgtgccctcgctggccacccacagcgcctatctcaaagacgaccagcgcagcactccggacagcacatacagcgagagcttcaaggacgcagccacagagaaatttcggagtgcttcagttggggctgaggagtacatgtatgatcagacatcaagtggcacatttcagtacaccctggaagccaccaaatctctccgtcagaagcagggggagggccccatgacctacctcaacaaaggacagttctatgccataacactcagcgagaccggagacaacaaatgcttccgacaccccatcagcaaagtcaggagtgtggtgatggtggtcttcagtgaagacaaaaacagagatgaacagctcaaatactggaaatactggcactctcggcagcatacggcgaagcagagggtccttgacattgccgattacaaggagagctttaatacgattggaaacattgaagagattgcatataatgctgtttcctttacctgggacgtgaatgaagaggcgaagattttcatcaccgtgaattgcttgagcacagatttctcctcccaaaaaggggtgaaaggacttcctttgatgattcagattgacacatacagttataacaatcgtagcaataaacccattcatagagcttattgccagatcaaggtcttctgtgacaaaggagcagaaagaaaaatccgagatgaagagcagaagcagaacaggaagaacgggaaaggccaggcctcccaaactcaatgcaacagctcctctgatgggaagttggctgccatacctttacagaagaagagtgacatcacctacttcaaaaccatgcctgatctccactcacagccagttctcttcatacctgatgttcactttgcaaacctgcagaggaccggacaggtgtattacaacacggatgatgaacgagaaggtggcagtgtccttgttaaacggatgttccggcccatggaagaggagtttggtccggtgccttcaaagcagatgaaagaagaagggacaaagcgagtgctcttgtacgtgaggaaggagactgacgatgtgttcgatgcattgatgttgaagtctcccacagtgatgggcctgatggaagcgatatctgagaaatatgggctgcccgtggagaagatagcaaagctttacaagaaaagcaaaaaaggcatcttggtgaacatggatgacaacatcatcgagcactactcgaacgaggacaccttcatcctcaacatggagagcatggtggagggcttcaaggtcacgctcatggaaatctagccctgggtttggcatccgctttggctggagctctcagtgcgttcctccctgagagagacagaagccccagccccagaacctggagacccatctcccccatctcacaactgctgttacaagaccgtgctggggagtggggcaagggacaggccccacagtcggtgtgcttggcccatccactggcacctaccacggagccgaagcctgagcccctcaggaaggtgccttaggcctgttggattcctatttattgcccaccttttcctggagcccaggtccaggcccgccaggactctgcaggtcactgctagctccagatgagaccgtccagcgttcccccttcaagagaaacactcatcccgaacagcctaaaaaattcccatcccttctttctcacccctccatatctatatctcccgagtggctggacaaaatgagctacgtctgggtgcagtagttataggtggggcaagaggtggatgcccactttctggtcagacacctttaggttgctctggggaaggctgtcttgctaaatacctccagggttcccagcaagtggccaccaggccttgtacaggaagacattcagtcaccgtgtaattagtaacacagaaagtctgcctgtctgcattgtacatagtgtttataatattgtaataatatattttacctgtggtatgtgggcatgtttactgccactggcctagaggagacacagacctggagaccgttttaatgggggtttttgcctctgtgcctgttcaagagacttgcagggctaggtagagggcctttgggatgttaaggtgactgcagctgatgccaagatggactctgcaatgggcatacctgggggctcgttccctgtccccagaggaagccccctctccttctccatgggcatgactctccttcgaggccaccacgtttatctcacaatgatgtgttttgcctgactttccctttgcgctgtctcgtgggaaaggtcattctgtctgagaccccagctccttctccagctttggctgcgggcatggcctgagctttctggagagcctctgcagggggtttgccatcagggccctgtggctgggtctgctgcagagctccttggctatcaggagaatcctggacactgtactgtgcctcccagtttacaaacacgcccttcatctcaagtggccctttaaaaggcctgctgccatgtgagagctgtgaacagctcagctctgagtcggcagactggggcttcctcctgggccaccagatggaaagggggtattgtttgcctcactcctggatgctgcgttttaaggaagtgagtgagaaagaatgtgccaagatacctggctcctgtgaaaccagcctcaggagggaaactgggagagagaagctgtggtctcctgctacatgccctgggagctggaagagaaaaacactcccctaaacaatcgcaaaatgatgaaccatcatgggccactgttctctttgaggggacaggtttaggggtttgcgttcgcccttgtgggctgaagcactagctttttggtagctagacacatcctgcacccaaaggttctctacaaaggcccagatttgtttgtaaagcactttgactcttacctggaggcccgctctctaagggcttcctgcgctcccacctcatctgtccctgagatgcagagcaggatggagggtctgcttctagctcagctgtttctccttgaggttgcggaggaattgaattgaatgggacagagggcaggtgctgtggccaagaagatctccgagcagcagtgacggggcaccttgctgtgtgtcctctgggcatgttaacccttctgtggggccaaaggtttgcatcgtggatccagctgtgctccagtctgtcccctcctcctccactctgactgccacgccccggaccagcagcttggggaccctccagggtactaatggggctctgttctgagatggacaaattcagtgttggaaatacatgttgtactatgcacttcccatgctcctagggttaggaatagtttcaaacatgattggcagacataacaacggcaaatactcggactggggcataggactccagagtaggaaaaagacaaaagatttggcagcctgacacaggcaacctacccctctctctccagcctctttatgaaactgtttgtttgccagtcctgccctaaggcagaagatgaattgaagatgctgtgcatgtttcctaagtccttgagcaatcatggtggtgacaattgccacaagggatatgaggccagtgccaccagagggtggtgccaagtgccacatcccttccgatccattcccctctgtatcctcggagcaccccagtttgcctttgatgtgtccgctgtgtatgttagctgaactttgatgagcaaaatttcctgagcgaaacactccaaagagataggaaaacttgccgcctcttcttttttgtcccttaatcaaactcaaataagcttaaaaaaaatccatggaagatcatggacatgtgaaatgagcatttttttcttttctttttttttttttttttttaacaaagtctgaactgaacagaacaagactttttcctcatacatctccaaattgtttaaacttactttatgagtgtttgtttagaagttcggaccaacagaaaaatgcagtcagatgtcatcttggaattggtttctaaaagagtaaggcatgtccctgcccagaaacttaggaagcatgaaataaatcaaatgtttattttccttcttatttaaaatcatgctaatgcaacagaaatagagggtttgtgccaaatgctatgaacggccctttcttaaagacaagcaagggagattgatatatgtacaatttgctctcatgttttt

SEQ ID NO: 91 - protein, 625 aa, Homo sapiens
MSQESDNNKRLVALVPMPSDPPFNTRRAYTSEDEAWKSYLENPLTAATKAMMIINGDEDSAAALGLLYDYYKVPRDKRLLSVSKASDSQEDQEKRNCLGTSEAQSNLSGGENRVQVLKTVPVNLSLNQDHLENSKREQYSISFPESSAIIPVSGITVVKAEDFTPVFMAPPVHYPRGDGEEQRVVIFEQTQYDVPSLATHSAYLKDDQRSTPDSTYSESFKDAATEKFRSASVGAEEYMYDQTSSGTFQYTLEATKSLRQKQGEGPMTYLNKGQFYAITLSETGDNKCFRHPISKVRSVVMVVFSEDKNRDEQLKYWKYWHSRQHTAKQRVLDIADYKESFNTIGNIEEIAYNAVSFTWDVNEEAKIFITVNCLSTDFSSQKGVKGLPLMIQIDTYSYNNRSNKPIHRAYCQIKVFCDKGAERKIRDEEQKQNRKNGKGQASQTQCNSSSDGKLAAIPLQKKSDITYFKTMPDLHSQPVLFIPDVHFANLQRTGQVYYNTDDEREGGSVLVKRMFRPMEEEFGPVPSKQMKEEGTKRVLLYVRKETDDVFDALMLKSPTVMGLMEAISEKYGLPVEKIAKLYKKSKKGILVNMDDNIIEHYSNEDTFILNMESMVEGFKVTLMEI

SEQ ID NO: 92 - DNA, 2085 bp, Homo sapiens
ggctgcagttacagagtgctgccatcaccaagtatgtggcggacgtcctgccggggaagaatcaaagagcagagagcatggccagtgcagcgagggaactggttatccagcggttgagtctggtgaggagtctttgcgagagcgaggagcagcggttactggaacaggtgcatggcgaagaggagcgggcccaccagagcatcctgacacagcgggtgcactgggccgaggcgctgcagaaacttgacaccatccgcactggcctggtgggcatgcttactcacctggatgacctccagctgattcagaaggagcaagagattttcgagaggaccgaagaagcagagggcattttggatccccaggagtcggaaatgttaaactttaatgagaagtgcactcggagcccactactgacccaactctgggcaacggcggttcttgggtctctctcaggcacagaggacatacggatcgatgagaggacagtcagccccttcctgcaattgtcagatgatcgaaagaccctgaccttcagcaccaagaagtcaaaggcctgtgcagatggcccggagcgcttcgaccactggcccaatgccctggctgccacctccttccagaatgggctccatgcctggatggtgaatgtccagaacagttgtgcctataaggtgggcgtggcttcaggccacctgccccgcaagggttctggcagtgactgccgtctgggccacaatgccttctcctgggtcttctctcgctatgatcaggagtttcgtttctcacacaatgggcagcacgagcccctggggctgctgcggggcccagcccagctgggtgtagtgctggacttgcaggttcaggagctgctcttctatgagccagcctccggcatagtgctctgtgcccatcatgtgtccttcccggggcccctcttcccagtctttgctgtggccgatcagaccatttctatcgtccgctgacctctggccacaggaagccaggtccaccgcccaccaccctttcaggccatgtttctactcagtgtgcttttcccaaatgatgtgtgtggtgtttctaagagaaacagggcccataaccagtgggcagctttaggagggatggggatctgtttcagatctaggcataacctgtaaatcacaggtgtccaaacttttggcttccctgggccacatttgaagaagaattttcttgggccacataaaatacactaacgatagctgatgagctaaaaaaaaaaaaaaaagtctgtgtataatttttgtgatatctgccaccacagataagcaaaaaagtccttgcattcaaagggttggagattgctgctttgagtgctgggtacctgtggggaacctactactccctgggccttagtctcccaaatccaccatgcatctgcccctctgagggtgtcttcactttgtctctggcatctagcatggtgcctggtgcatagtgagcatgcaataaatatttggcaggtgagtggatggatagatggataggtgaatgtaggtggacaggtgactgggtggatgttgtggtctctggagaagcactgccattcagcctcctgctccagctgttcacatgcagaaatgctctcttcacaggcagagaagcctgtggctaaagtttccacatcccattaactcagtgcttttgtctttttcatgacatggcacatagagaaaatatttttttctagcacacaagagcaacctgaaaggctgctcctggctaggggactctgtcccgggggaccgtgtcctcccccatgtcctgcctaggccctcagaggaccaggggatcatgtctccaggtaacccgactgtagcccctgctggctgagctccagcctgtgcccactgataatagcagggacggcctttctcttagagcagctgataagtttccctacctgatggccccctctgacataaactgcacacctggggtgatggcttaaagccagaaagagctgagggagttaagagggccaaccttagggcacgtgggcattattaaaggtcttaaaagcattaaaaaaaaaaaaaaaaaaaa

SEQ ID NO: 93 - protein, 301 aa, Homo sapiens
MASAARELVIQRLSLVRSLCESEEQRLLEQVHGEEERAHQSILTQRVHWAEALQKLDTIRTGLVGMLTHLDDLQLIQKEQEIFERTEEAEGILDPQESEMLNFNEKCTRSPLLTQLWATAVLGSLSGTEDIRIDERTVSPFLQLSDDRKTLTFSTKKSKACADGPERFDHWPNALAATSFQNGLHAWMVNVQNSCAYKVGVASGHLPRKGSGSDCRLGHNAFSWVFSRYDQEFRFSHNGQHEPLGLLRGPAQLGVVLDLQVQELLFYEPASGIVLCAHHVSFPGPLFPVFAVADQTISIVR

SEQ ID NO: 94 - DNA, 2317 bp, Homo sapiens
aaaactccaggaggcggaggaggctagtggcagtacctgggcaccctgaccctccccacaggccagagcccaccctcctgctcatgagggcagacaggcctttccagggacacagtccctcttctccccaggaccccagggccaactccccctgccggccctctgccatcaaattggcagtggctccaggggagtcccctggggatgggggaccactgttggggacccctctgcgtgcacccctgtagttggggaagcaggacaggggcctggggagacggaagggcgccaggggttgagagaggatggtggacgttgttggacttgaaagggaaacaggccctcggggaagcccctggccaggcctgcctctcccctccctggtgggcccagcgcccctgctcacttgtctctgcccacagtgcctgtctgtggaggacgccctgggcctgggcgagcctgaggggtcagggctgcccccgggcccggtcctggaggccaggtacgtcgcccgcctcagtgccgccgccgtcctgtacctcagcaaccccgagggcacctgtgaggacgctcgggctggcctctgggcctctcatgcagaccacctcctggccctgctcgagagccccaaggccctgaccccgggcctgagctggctgctgcagaggatgcaggcccgggctgccggccagacccccaagacggcctgcgtagatatccctcagctgctggaggaggcggtgggggcgggggctccgggcagtgctggcggcgtcctggctgccctgctggaccatgtcaggagcgggtcttgcttccacgccttgccgagccctcagtacttcgtggactttgtgttccagcagcacagcagcgaggtccctatgacgctggccgagctgtcagccttgatgcagcgcctgggggtgggcagggaggcccacagtgaccacagtcatcggcacaggggagccagcagccgggaccctgtgcccctcatcagctccagcaacagctccagtgtgtgggacacggtatgcctgagtgccagggacgtgatggctgcatatggactgtcggaacaggctggggtgaccccggaggcctgggcccaactgagccctgccctgctccaacagcagctgagtggagcctacacctcccagtccaggccccccgtccaggaccagctcagccagtcagagagatatctgtacggctccctggccacgctgctcatctgcctctgcgcggtctttggcctcctgctgctgacctgcactggctgcaggggggtcgcccactacatcctgcagaccttcctgagcctggcagtgggtgcactcactggggacgctgtcctgcatctgacgcccaaggtgctggggctgcatacacacagcgaagagggcctcagcccacagcccacctggcgcctcctggctatgctggccgggctctacgccttcttcctgtttgagaacctcttcaatctcctgctgcccagggacccggaggacctggaggacgggccctgcggccacagcagccatagccacgggggccacagccacggtgtgtccctgcagctggcacccagcgagctccggcagcccaagcccccccacgagggctcccgcgcagacctggtggcggaggagagcccggagctgctgaaccctgagcccaggagactgagcccagagttgaggctactgccctatatgatcactctgggcgacgccgtgcacaacttcgccgacgggctggccgtgggcgccgccttcgcgtcctcctggaagaccgggctggccacctcgctggccgtgttctgccacgagttgccacacgagctgggggacttcgccgccttgctgcacgcggggctgtccgtgcgccaagcactgctgctgaacctggcctccgcgctcacggccttcgctggtcttacgtggcactcgcggttggagtcagcgaggagagcgaggcctggatcctggcagtggccaccggcctgttccttacgtagcactctgcgacatgctcccggcgatgttgaaagtacgggacccgcggcccctggctcctcttcctgctgcacaacgtgggcctgctgggcggctggaccgtcctgctgctgctgtccctgtacgaggatgacatcaccttctgataccctgccctagtcccccacctttgacttaagatcccacacctcacaaacctacagcccagaaacccagaagcccctatagaggccccagtcccaactccagtaaagacactcttgtcccttggaaaaaaaaaaaaaaaaaaa

SEQ ID NO: 95 - protein, 626 aa, Homo sapiens
MVDVVGLERETGPRGSPWPGLPLPSLVGPAPLLTCLCPQCLSVEDALGLGEPEGSGLPPGPVLEARYVARLSAAAVLYLSNPEGTCEDARAGLWASHADHLLALLESPKALTPGLSWLLQRMQARAAGQTPKTACVDIPQLLEEAVGAGAPGSAGGVLAALLDHVRSGSCFHALPSPQYFVDFVFQQHSSEVPMTLAELSALMQRLGVGREAHSDHSHRHRGASSRDPVPLISSSNSSSVWDTVCLSARDVMAAYGLSEQAGVTPEAWAQLSPALLQQQLSGAYTSQSRPPVQDQLSQSERYLYGSLATLLICLCAVFGLLLLTCTGCRGVAHYILQTFLSLAVGALTGDAVLHLTPKVLGLHTHSEEGLSPQPTWRLLAMLAGLYAFFLFENLFNLLLPRDPEDLEDGPCGHSSHSHGGHSHGVSLQLAPSELRQPKPPHEGSRADLVAEESPELLNPEPRRLSPELRLLPYMITLGDAVHNFADGLAVGAAFASSWKTGLATSLAVFCHELPHELGDFAALLHAGLSVRQALLLNLASALTAFAGLTWHSRLESARRARPGSWQWPPACSLRSTLRHAPGDVESTGPAAPGSSSCCTTWACWAAGPSCCCCPCTRMTSPSDTLP

SEQ ID NO: 96 - DNA, 2761 bp, Homo sapiens
agcgggctctgcagagaaatcaaagatggcggttgtatctgctgttcgctggctgggcctccgcagcaggcttggccagccgctgacgggtcggcgggcgggtttgtgtgaacaggcacgcagctgcagattttattctggtagtgcaaccctctcaaaggttgaaggaactgatgtaacagggattgaagaagtagtaattccaaaaaagaaaacttgggataaagtagccgttcttcaggcacttgcatccacagtaaacagggataccacagctgtgccttatgtgtttcaagatgatccttaccttatgccagcatcatctttggaatctcgttcatttttactggcaaagaaatccggggagaatgtggccaagtttattattaattcataccccaaatattttcagaaggacatagctgaacctcatataccgtgtttaatgcctgagtactttgaacctcagatcaaagacataagtgaagccgccctgaaggaacgaattgagctcagaaaagtcaaagcctctgtggacatgtttgatcagcttttgcaagcaggaaccactgtgtctcttgaaacaacaaatagtctcttggatttattgtgttactatggtgaccaggagccctcaactgattaccattttcaacaaactggacagtcagaagcattggaagaggaaaatgatgagacatctaggaggaaagctggtcatcagtttggagttacatggcgagcaaaaaacaacgctgagagaatcttttctctaatgccagagaaaaatgaacattcctattgcacaatgatccgaggaatggtgaagcaccgagcttatgagcaggcattaaacttgtacactgagttactaaacaacagactccatgctgatgtatacacatttaatgcattgattgaagcaacagtatgtgcgataaatgagaaatttgaggaaaaatggagtaaaatactggagctgctaagacacatggttgcacagaaggtgaaaccaaatcttcagacttttaataccattctgaaatgtctccgaagatttcatgtgtttgcaagatcgccagccttacaggttttacgtgaaatgaaagccattggaatagaaccctcgcttgcaacatatcaccatattattcgcctgtttgatcaacctggagaccctttaaagagatcatccttcatcatttatgatataatgaatgaattaatgggaaagagattttctccaaaggacccggatgatggcatataagttttttcagtcagccatgagcatatgctcatctctcagagatctagaacttgcctaccaagtacatggccttttaaaaaccggagacaactggaaattcattggacctgatcaacatcgtaatttctattattccaagttcttcgatttgatttgtctaatggaacaaattgatgttaccttgaagtggtatgaggacctgataccttcagcctactttccccactcccaaacaatgatacatcttctccaagcattggatgtggccaatcggctagaagtgattcctaaaatttggaaagatagtaaagaatatggtcatactttccgcagtgacctgagagaagagatcctgatgctcatggcaagggacaagcacccaccagagcttcaggtggcatttgctgactgtgctgctgatatcaaatctgcgtatgaaagccaacccatcagacagactgctcaggattggccagccacctctctcaactgtatagctatcctctttttaagggctgggagaactcaggaagcctggaaaatgttggggcttttcaggaagcataataagattcctagaagtgagttgctgaatgagcttatggacagtgcaaaagtgtctaacagcccttcccaggccattgaagtagtagagctggcaagtgccttcagcttacctatttgtgagggcctcacccagagagtaatgagtgattttgcaatcaaccaggaacaaaaggaagccctaagtaatctaactgcattgaccagtgacagtgatactgacagcagcagtgacagcgacagtgacaccagtgaaggcaaatgaaagtggagattcaggagcagcaatggtctcaccatagctgctggaatcacacctgagaactgagatataccaatatttaacattgttacaaagaagaaaagatacagatttggtgaatttgttactgtgaggtacagtcagtacacagctgacttatgtagatttaagctgctaatatgctacttaaccatctattaatgcaccattaaaggcttagcatttaagtagcaacattgcggttttcagacacatggtgaggtccatggctcttgtcatcaggataagcctgcacacctagagtgtcggtgagctgacctcacgatgctgtcctcgtgcgattgccctctcctgctgctggacttctgcctttgttggcctgatgtgctgctgtgatgctggtccttcatcttaggtgttcatgcagttctaacacagttggggttgggtcaatagtttcccaatttcaggatatttcgatgtcagaaataacgcatcttaggaatgactaaacaagataatggcagtttaggctgcacaactggtaaaatgactgtagataaatgttgtaattagtgtacacgtttgtatttttgttaatatagccgctgccatagttttctaacttgaaaaaaaaaaaaaaaaaaaaaaaaaaaaaaaaaaaa

SEQ ID NO: 97 - protein, 422 aa, Homo sapiens
AGSAEKSKMAVVSAVRWLGLRSRLGQPLTGRRAGLCEQARSCRFYSGSATLSKVEGTDVTGIEEVVIPKKKTWDKVAVLQALASTVNRDTTAVPYVFQDDPYLMPASSLESRSFLLAKKSGENVAKFIINSYPKYFQKDIAEPHIPCLMPEYFEPQIKDISEAALKERIELRKVKASVDMFDQLLQAGTTVSLETTNSLLDLLCYYGDQEPSTDYHFQQTGQSEALEEENDETSRRKAGHQFGVTWRAKNNAERIFSLMPEKNEHSYCTMIRGMVKHRAYEQALNLYTELLNNRLHADVYTFNALIEATVCAINEKFEEKWSKILELLRHMVAQKVKPNLQTFNTILKCLRRFHVFARSPALQVLREMKAIGIEPSLATYHHIIRLFDQPGDPLKRSSFIIYDIMNELMGKRFSPKDPDDGI

SEQ ID NO: 98 - DNA, 2757 bp, Homo sapiens
agcgggctctgcagagaaatcaaagatggcggttgtatctgctgttcgctggctgggcctccgcagcaggcttggccagccgctgacgggtcggcgggcgggtttgtgtgaacaggcacgcagctgcagattttattctggtagtgcaaccctctcaaaggttgaaggaactgatgtaacagggattgaagaagtagtaattccaaaaaagaaaacttgggataaagtagccgttcttcaggcacttgcatccacagtaaacagggataccacagctgtgccttatgtgtttcaagatgatccttaccttatgccagcatcatctttggaatctcgttcatttttactggcaaagaaatccggggagaatgtggccaagtttattattaattcataccccaaatattttcagaaggacatagctgaacctcatataccgtgtttaatgcctgagtactttgaacctcagatcaaagacataagtgaagccgccctgaaggaacgaattgagctcagaaaagtcaaagcctctgtggacatgtttgatcagcttttgcaagcaggaaccactgtgtctcttgaaacaacaaatagtctcttggatttattgtgttactatggtgaccaggagccctcaactgattaccattttcaacaaactggacagtcagaagcattggaagaggaaaatgatgagacatctaggaggaaagctggtcatcagtttggagttacatggcgagcaaaaaacaacgctgagagaatcttttctctaatgccagagaaaaatgaacattcctattgcacaatgatccgaggaatggtgaagcaccgagcttatgagcaggcattaaacttgtacactgagttactaaacaacagactccatgctgatgtatacacatttaatgcattgattgaagcaacagtatgtgcgataaatgagaaatttgaggaaaaatggagtaaaatactggagctgctaagacacatggttgcacagaaggtgaaaccaaatcttcagacttttaataccattctgaaatgtctccgaagatttcatgtgtttgcaagatcgccagccttacaggttttacgtgaaatgaaagccattggaatagaaccctcgcttgcaacatatcaccatattattcgcctgtttgatcaacctggagaccctttaaagagatcatccttcatcatttatgatataatgaatgaattaatgggaaagagattttctccaaaggacccggatgatgataagttttttcagtcagccatgagcatatgctcatctctcagagatctagaacttgcctaccaagtacatggccttttaaaaaccggagacaactggaaattcattggacctgatcaacatcgtaatttctattattccaagttcttcgatttgatttgtctaatggaacaaattgatgttaccttgaagtggtatgaggacctgataccttcagcctactttccccactcccaaacaatgatacatcttctccaagcattggatgtggccaatcggctagaagtgattcctaaaatttggaaagatagtaaagaatatggtcatactttccgcagtgacctgagagaagagatcctgatgctcatggcaagggacaagcacccaccagagcttcaggtggcatttgctgactgtgctgctgatatcaaatctgcgtatgaaagccaacccatcagacagactgctcaggattggccagccacctctctcaactgtatagctatcctctttttaagggctgggagaactcaggaagcctggaaaatgttggggcttttcaggaagcataataagattcctagaagtgagttgctgaatgagcttatggacagtgcaaaagtgtctaacagcccttcccaggccattgaagtagtagagctggcaagtgccttcagcttacctatttgtgagggcctcacccagagagtaatgagtgattttgcaatcaaccaggaacaaaaggaagccctaagtaatctaactgcattgaccagtgacagtgatactgacagcagcagtgacagcgacagtgacaccagtgaaggcaaatgaaagtggagattcaggagcagcaatggtctcaccatagctgctggaatcacacctgagaactgagatataccaatatttaacattgttacaaagaagaaaagatacagatttggtgaatttgttactgtgaggtacagtcagtacacagctgacttatgtagatttaagctgctaatatgctacttaaccatctattaatgcaccattaaaggcttagcatttaagtagcaacattgcggttttcagacacatggtgaggtccatggctcttgtcatcaggataagcctgcacacctagagtgtcggtgagctgacctcacgatgctgtcctcgtgcgattgccctctcctgctgctggacttctgcctttgttggcctgatgtgctgctgtgatgctggtccttcatcttaggtgttcatgcagttctaacacagttggggttgggtcaatagtttcccaatttcaggatatttcgatgtcagaaataacgcatcttaggaatgactaaacaagataatggcagtttaggctgcacaactggtaaaatgactgtagataaatgttgtaattagtgtacacgtttgtatttttgttaatatagccgctgccatagttttctaacttgaaaaaaaaaaaaaaaaaaaaaaaaaaaaaaaaaaaa

SEQ ID NO: 99 - protein, 697 aa, Homo sapiens
AGSAEKSKMAVVSAVRWLGLRSRLGQPLTGRRAGLCEQARSCRFYSGSATLSKVEGTDVTGIEEVVIPKKKTWDKVAVLQALASTVNRDTTAVPYVFQDDPYLMPASSLESRSFLLAKKSGENVAKFIINSYPKYFQKDIAEPHIPCLMPEYFEPQIKDISEAALKERIELRKVKASVDMFDQLLQAGTTVSLETTNSLLDLLCYYGDQEPSTDYHFQQTGQSEALEEENDETSRRKAGHQFGVTWRAKNNAERIFSLMPEKNEHSYCTMIRGMVKHRAYEQALNLYTELLNNRLHADVYTFNALIEATVCAINEKFEEKWSKILELLRHMVAQKVKPNLQTFNTILKCLRRFHVFARSPALQVLREMKAIGIEPSLATYHHIIRLFDQPGDPLKRSSFIIYDIMNELMGKRFSPKDPDDDKFFQSAMSICSSLRDLELAYQVHGLLKTGDNWKFIGPDQHRNFYYSKFFDLICLMEQIDVTLKWYEDLIPSAYFPHSQTMIHLLQALDVANRLEVIPKIWKDSKEYGHTFRSDLREEILMLMARDKHPPELQVAFADCAADIKSAYESQPIRQTAQDWPATSLNCIAILFLRAGRTQEAWKMLGLFRKHNKIPRSELLNELMDSAKVSNSPSQAIEVVELASAFSLPICEGLTQRVMSDFAINQEQKEALSNLTALTSDSDTDSSSDSDSDTSEGK

SEQ ID NO: 100 - DNA, 1940 bp, Homo sapiens
tacatggcgagcaaaaaaacaacgctgagagaatcttttctctaatgccagagaaaaatgaacattcctattgcacaatgatccgaggaatggtgaagctgatgtatacacatttaatgcattgattgaagcaacagtatgtgcgataaatgagaaatttgaggaaaaatggagtaaaatactggagctgctaagacacatggttgcacagaaggtgaaaccaaatcttcagacttttaataccattctgaaatgtctccgaagatttcatgtgtttgcaagatcgccagccttacaggttttacgtgaaatgaaagccattggaatagaaccctcgcttgcaacatatcaccatattattcgcctgtttgatcaacctggagaccctttaaagagatcatccttcatcatttatgatataatgaatgaattaatgggaaagagattttctccaaaggacccggatgatggcatataagttttttcagtcagccatgagcatatgctcatctctcagagatctagaacttgcctaccaagtacatggccttttaaaaaccggagacaactggaaattcattggacctgatcaacatcgtaatttctattattccaagttcttcgatttgatttgtctaatggaacaaattgatgttaccttgaagtggtatgaggacctgataccttcagcctactttccccactcccaaacaatgatacatcttctccaagcattggatgtggccaatcggctagaagtgattcctaaaatttggaaagatagtaaagaatatggtcatactttccgcagtgacctgagagaagagatcctgatgctcatggcaagggacaagcacccaccagagcttcaggtggcatttgctgactgtgctgctgatatcaaatctgcgtatgaaagccaacccatcagacagactgctcaggattggccagccacctctctcaactgtatagctatcctctttttaagggctgggagaactcaggaagcctggaaaatgttggggcttttcaggaagcataataagattcctagaagtgagttgctgaatgagcttatggacagtgcaaaagtgtctaacagcccttcccaggccattgaagtagtagagctggcaagtgccttcagcttacctatttgtgagggcctcacccagagagtaatgagtgattttgcaatcaaccaggaacaaaaggaagccctaagtaatctaactgcattgaccagtgacagtgatactgacagcagcagtgacagcgacagtgacaccagtgaaggcaaatgaaagtggagattcaggagcagcaatggtctcaccatagctgctggaatcacacctgagaactgagatataccaatatttaacattgttacaaagaagaaaagatacagatttggtgaatttgttactgtgaggtacagtcagtacacagctgacttatgtagatttaagctgctaatatgctacttaaccatctattaatgcaccattaaaggcttagcatttaagtagcaacattgcggttttcagacacatggtgaggtccatggctcttgtcatcaggataagcctgcacacctagagtgtcggtgagctgacctcacgatgctgtcctcgtgcgattgccctctcctgctgctggacttctgcctttgttggcctgatgtgctgctgtgatgctggtccttcatcttaggtgttcatgcagttctaacacagttggggttgggtcaatagtttcccaatttcaggatatttcgatgtcagaaataacgcatcttaggaatgactaaacaagataatggcagtttaggctgcacaactggtaaaatgactgtagataaatgttgtaattagtgtacacgtttgtatttttgttaatatagccgctgccatagttttctaacttgaacagcc

SEQ ID NO: 101 - protein, 280 aa, Homo sapiens
MMAYKFFQSAMSICSSLRDLELAYQVHGLLKTGDNWKFIGPDQHRNFYYSKFFDLICLMEQIDVTLKWYEDLIPSAYFPHSQTMIHLLQALDVANRLEVIPKIWKDSKEYGHTFRSDLREEILMLMARDKHPPELQVAFADCAADIKSAYESQPIRQTAQDWPATSLNCIAILFLRAGRTQEAWKMLGLFRKHNKIPRSELLNELMDSAKVSNSPSQAIEVVELASAFSLPICEGLTQRVMSDFAINQEQKEALSNLTALTSDSDTDSSSDSDSDTSEGK

SEQ ID NO: 102 - DNA, 1853 bp, Homo sapiens
gcagtgtcactaggccggctgggggccctgggtacgctgtagaccagaccgcgacaggccagaacacgggcggcggcttcgggccgggagacccgcgcagccctcggggcatctcagtgcctcattccccaccccctcccccgggtcgggggaggcggcgcgtccggcggagggttgaggggagcggggcaggcctggagcgccatgagcagcccggatgcgggatacgccagtgacgaccagagccagacccagagcgcgctgcccgcggtgatggccgggctgggcccctgcccctgggccgagtcgctgagccccatcggggacatgaaggtgaagggcgaggcgccggcgaacagcggagcaccggccggggccgcgggccgagccaagggcgagtcccgtatccggcggccgatgaacgctttcatggtgtgggctaaggacgagcgcaagcggctggcgcagcagaatccagacctgcacaacgccgagttgagcaagatgctgggcaagtcgtggaaggcgctgacgctggcggagaagcggcccttcgtggaggaggcagagcggctgcgcgtgcagcacatgcaggaccaccccaactacaagtaccggccgcggcggcgcaagcaggtgaagcggctgaagcgggtggagggcggcttcctgcacggcctggctgagccgcaggcggccgcgctgggccccgagggcggccgcgtggccatggacggcctgggcctccagttccccgagcagggcttccccgccggcccgccgctgctgcctccgcacatgggcggccactaccgcgactgccagagtctgggcgcgcctccgctcgacggctacccgttgcccacgcccgacacgtccccgctggacggcgtggaccccgacccggctttcttcgccgccccgatgcccggggactgcccggcggccggcacctacagctacgcgcaggtctcggactacgctggccccccggagcctcccgccggtcccatgcacccccgactcggcccagagcccgcgggtccctcgattccgggcctcctggcgccacccagcgcccttcacgtgtactacggcgcgatgggctcgcccggggcgggcggcgggcgcggcttccagatgcagccgcaacaccagcaccagcaccagcaccagcaccaccccccgggccccggacagccgtcgccccctccggaggcactgccctgccgggacggcacggaccccagtcagcccgccgagctcctcggggaggtggaccgcacggaatttgaacagtatctgcacttcgtgtgcaagcctgagatgggcctcccctaccaggggcatgactccggtgtgaatctccccgacagccacggggccatttcctcggtggtgtccgacgccagctccgcggtatattactgcaactatcctgacgtgtgacaggtccctgatccgccccagcctgcaggccagaagcagtgttacacacttcctggaggagctaaggaaatcctcagactcctgggtttttgttgttgctgttgttgttttttaaaaggtgtgttggcatataatttatggtaatttattttgtctgccacttgaacagtttgggggggtgaggtttcatttaaaatttgttcagagatttgtttcccacagttggattgtcaaaaccctatttccaagttcaagttaactagctttgaatgtgtcccaaaacagcttcctccatttcctgaaagtttattgatcaaagaaatgttgtcctgggtgtgttttttcaatcttctaaaaaataaaatctggaatcctgaaaaaaaaaaaaaaaaaaaaaaaaaaaa

SEQ ID NO: 103 - protein, 414 aa, Homo sapiens [sequence omitted]

SEQ ID NO: 104 - DNA, 2398 bp, Homo sapiens
ttacttacttgcttgcctgcttgcttagagacagggtctccctttgtctcccaggctggagtgcagtggcatgatcatagctcactgcaggttcaaacttctgggctcaagtaatcctaccgcctcagcctcatgagtagctgggactacaggtgtgggtgtccacgcccagctaattttttttttctttagtagagatgaggtcttgctatgttgcccaggctggtcttgaacttctagactcaagcaatcctcttgcctcggcctcccaaagtgctgggattacaggcatgagccactgcacaggcccctttccttttttctccattttctttcttttttctcccccttttctgggaggcaggccagcctcacagccagacaccagctgtgggagttgtcttacgcatatgctctgccccttagaaggattcagtctgtgccctggaggggcctacggtcccgcctggttgtgggtctgtcttgaacacaaatggtgaggttgaaatggatgctagtatcatggatggaaaagacctgtctgcaggagcagtgtccgcagtccagtgtatagcaaatcccattaaacttgctcggcttgtcatggaaaagacacctcattgctttctgactgaccaaggcgcagcgcagtttgcagcagctatgggggttccagagattcctggagaaaaactggtgacagagagaaacaaaaagcgcctggaaaaagagaagcatgaaaaaggtgctcagaaaacagattgtcaaaaaaacttgggaaccgtgggtgctgttgccttggactgcaaagggaatgtagcctacgcaacctccacaggcggtatcgttaataaaatggtcggccgcgttggggactcaccgtgtctaggagctggaggttatgccgacaatgacatcggagccgtctcaaccacagggcatggggaaagcatcctgaaggtgaacctggctagactcaccctgttccacatagaacaaggaaagacggtagaagaggctgcggacctatcgttgggttatatgaagtcaagggttaaaggtttaggtggcctcatcgtggttagcaaaacaggagactgggtggcaaagtggacctccacctccatgccctgggcagccgccaaggacggcaagctgcacttcggaattgatcctgacgatactactatcaccgaccttccctaagccgctggaagattgtattccagatgctagcttagaggtcaagtacagtctcctcatgagacatagcctaatcaattagatctagaattggaaaaattgtcccgtctgtcacttgttttgttgccttaataagcatctgaatgtttggttgtggggcgggttctgaagcratgagagaaatgcccgtattaggaggattacttgagccctggaggtcaaagctgaggtgagccatgattactccactgcactccagcctgggcaacagagccaggccctgtwkcmmawrawwamwmmamwrmamwmcagcctgggcaacagagccaggccctgtatcaaaaaaaaaagaaaagggaaaaaagaaagaaagcagcagcatgatcctgacatgacagatgtgggagacccacagcctgcagacactgtgggctggaaggtgggaagggaggggccggtggaggtggagctgtttgaaagtgacacagcagcagtagaagcagtggtgggcgaagcccaggtgaccctcagaacgttgcacaagaacatcagggaaaagaaccagaatcctttaaggaaaatgttcttcatgtatgagagactaaagtgatttttctaagaaagttcagcccttctctgacttacctggacatttctagatacttccaaaggaccctctgggaatccatagcttcctaatctggagatgggaggtcataagggagacgctgtggggttccttgaagtttcttgggttcacagaggagccccctcacttggtgttctcccgtgagccagcctccacctgccaaagacactctggtcctcgtatagtgagtaatggggctcagggcctctccaacaacagagaggagctgatgctgtagggctgaccccgtgacttcctgagtcctcaccctgtccagtgctttgagattcttcccacctccccatcctcaccagccggatcgggcgctgtgcagtgtggtcagcatggtgaagaaagtcatttccttggtggacagtattcctctttatctctcattacactggaaatgttatttctgctgtatcatccgtgctcaacgttttagtctgtcaggctcaccttctctctggaaagaatttgcttaacttgacattccatgtgccgctaataaaatatattttgaaagaaaaaaaaaaaaaaaaaaaa

SEQ ID NO: 105 - protein, 232 aa, Homo sapiens
MDASIMDGKDLSAGAVSAVQCIANPIKLARLVMEKTPHCFLTDQGAAQFAAAMGVPEIPGEKLVTERNKKRLEKEKHEKGAQKTDCQKNLGTVGAVALDCKGNVAYATSTGGIVNKMVGRVGDSPCLGAGGYADNDIGAVSTTGHGESILKVNLARLTLFHIEQGKTVEEAADLSLGYMKSRVKGLGGLIVVSKTGDWVAKWTSTSMPWAAAKDGKLHFGIDPDDTTITDLP

SEQ ID NO: 106 - DNA, 1811 bp, Homo sapiens
gagtcaccaaggaaggcagcggcagctccactcagccagtacccagatacgctgggaaccttccccagccatggcttccctggggcagatcctcttctggagcataattagcatcatcattattctggctggagcaattgcactcatcattggctttggtatttcagggagacactccatcacagtcactactgtcgcctcagctgggaacattggggaggatggaatccagagctgcacttttgaacctgacatcaaactttctgatatcgtgatacaatggctgaaggaaggtgttttaggcttggtccatgagttcaaagaaggcaaagatgagctgtcggagcaggatgaaatgttcagaggccggacagcagtgtttgctgatcaagtgatagttggcaatgcctctttgcggctgaaaaacgtgcaactcacagatgctggcacctacaaatgttatatcatcacttctaaaggcaaggggaatgctaaccttgagtataaaactggagccttcagcatgccggaagtgaatgtggactataatgccagctcagagaccttgcggtgtgaggctccccgatggttcccccagcccacagtggtctgggcatcccaagttgaccagggagccaacttctcggaagtctccaataccagctttgagctgaactctgagaatgtgaccatgaaggttgtgtctgtgctctacaatgttacgatcaacaacacatactcctgtatgattgaaaatgacattgccaaagcaacaggggatatcaaagtgacagaatcggagatcaaaaggcggagtcacctacagctgctaaactcaaaggcttctctgtgtgtctcttctttctttgccatcagctgggcacttctgcctctcagcccttacctgatgctaaaataatgtgcctcggccacaaaaaagcatgcaaagtcattgttacaacagggatctacagaactatttcaccaccagatatgacctagttttatatttctgggaggaaatgaattcatatctagaagtctggagtgagcaaacaagagcaagaaacaaaaagaagccaaaagcagaaggctccaatatgaacaagataaatctatcttcaaagacatattagaagttgggaaaataattcatgtgaactagagtcaactgtgtcagggctaagaaaccctggttttgagtagaaaagggcctggaaagaggggagccaacaaatctgtctgcttcctcacattagtcattggcaaataagcattctgtctctttggctgctgcctcagcacagagagccagaactctatcgggcaccaggataacatctctcagtgaacagagttgacaaggcctatgggaaatgcctgatgggattatcttcagcttgttgagcttctaagtttctttcccttcattctaccctgcaagccaagttctgtaagagaaatgcctgagttctagctcaggttttcttactctgaatttagatctccagaccctgcctggccacaattcaaattaaggcaacaaacatataccttccatgaagcacacacagacttttgaaagcaaggacaatgactgcttgaattgaggccttgaggaatgaagctttgaaggaaaagaatactttgtttccagcccccttcccacactcttcatgtgttaaccactgccttcctggaccttggagccacggtgactgtattacatgttgttatagaaaactgattttagagttctgatcgttcaagagaatgattaaatatacatttcctaaaaaaaaaaaaaaaaa

SEQ ID NO: 107 - protein, 282 aa, Homo sapiens
MASLGQILFWSIISIIIILAGAIALIIGFGISGRHSITVTTVASAGNIGEDGIQSCTFEPDIKLSDIVIQWLKEGVLGLVHEFKEGKDELSEQDEMFRGRTAVFADQVIVGNASLRLKNVQLTDAGTYKCYIITSKGKGNANLEYKTGAFSMPEVNVDYNASSETLRCEAPRWFPQPTVVWASQVDQGANFSEVSNTSFELNSENVTMKVVSVLYNVTINNTYSCMIENDIAKATGDIKVTESEIKRRSHLQLLNSKASLCVSSFFAISWALLPLSPYLMLK

SEQ ID NO: 108 - DNA, 2611 bp, Homo sapiens
cttttttcacctcgtctgaaatggctgcctcccagtgtctctgctgctcaaaatttctcttccagagacagaacctcgcctgtttcctcacaaacccacactgtggcagccttgttaatgcagatggccatggtgaagtgtggacagactggaataatatgtccaagtttttccagtatggatggcgatgcaccactaatgagaatacctattcaaaccgtaccctgatgggcaactggaaccaggaaagatatgacctgaggaatatcgtgcagcccaaacccttgccttcccagtttggacactactttgaaacaacatatgatacaagctacaacaacaaaatgccactttcaacacatagatttaagcgagagcctcactggttcccaggacatcaacctgaactggatcctccccgatacaaatgcacagaaaagtcaacttacatgaatagctattcaaagccttaaattgggcatcactcaggatgtgtataagatcttaatattgatagtttcacatccaggtttctaagaaatgataagatacttcacttttccagagtgaaatgtaggagggagcacattctaagtacagctaaaaatttagctcactgtaacacagtttcactctctgaataaataaagcaaaaaacacagtaaatattctttatccctttttttgttgttgttttaaccaagatttaaatgtcaaatttaatacagcaactcagttctacatttggggtgttgtagaagggccttaaaaagaattattttaggccaggcacggtggctcatgcctgtaatcccagcactttgggaggccgaggcaggtggatcacgtgaggtcaggagttcgagaccagcctgaccaacatggtgaaacactgtctctactaaaaacacaaaaattagctgagcatggtggctcacgcctgtaatcccagctactcaggaggctgaggcaggggaatcgcttgaacctgagaagtggaggttgtggtgagctgagatcatgccactgcactttagcctgggtgacagagcgagactctgtctcaaaaaaaaaaaaaaaaaaagaattatttctctgaagtctacaaccactgtggtcttcccttccttctgtcgtagcaagacctcagaatctagcataacttaggctaggtttggctagatgctttctgggtataagccagagtcgtatagtgcaactttgctgtgaccttagtgaacatcccctcttgaggactacaaaaacaaacgtaactttttaaaattattatggagaattttacgtaaaacaaaagtagacaggctagtctaatgaactcccatgtatcattacccagcatcaactatttatgactaatcttacctacttctactttgtcttattgaattaattttggagcagatcttagaaatagaatttaatctataaaaatcttggtgggctgggtacggtggctcatgcctgtaatcccagcactttgggaggctgaggtgggtggatcacctgaggtcaggagtccaagaccagcctggccaatgtggtgaaactccatctcttctaaaaatacaaaaattagctggtcttggtggcgggcgcctgtaatcccagctacttgggaggctgaggcaggagaattgcttgaacccaggaagcagaggttgcagtgagctgagacggtgccattgctctccagcctgggcgacaagagcgaaactccgtctcaaaaaaaaaaaagaaaagaaaaagaaaaaaaaaatcttggtatactggctgggcacagtggctcacacctaatcccagcactttgggaggctgaggcaggaggatagcttgaggctgggagttcaaaaccagcctgggcaacatagcaagaccccatctctaccaaaaaaaatttttttaaagatttcaggtatatttctcaaaaagataaggactgtcaattgtctactcccccccaacaaaggtcactaaggaaacctgttgactaaacaaagctcattaaacctattgtagtgtagcaaaggagaccatcaacttgacacagagtcttggtaatgattcaaagggaggatgttagagtaaggtatttataaggatttgagataagggtccaactggtttaaaatgagtcaaaatagggaactagtagagactgagaaagggttgtgaatagcttaggtttggtaaacttaggaaatcaacagttttaattttaatatggttaaactgattagtatttcctatttttttatctactgtgtaagaagaccctataatatatgggcattactgagagatactgcccatatgttgtcctcgtaagcaaggagatattttttatctcccatatattacctttcaaacctttgttactttagtttcgagatatagatccagtttatgttgttactcagtagtgaggaagtttcttttttttttttaaatggctatcaagttgtccccccattagttattgaaaagaccataattttttcactcctattcaatgccatttttattgtaaataaactatgtacatgtaaaaaaaaaaaaaaaaaaaaaaaaaaaaaaaaaaaaaaaaaaaaaa

SEQ ID NO: 109 - protein, 150 aa, Homo sapiens
MAASQCLCCSKFLFQRQNLACFLTNPHCGSLVNADGHGEVWTDWNNMSKFFQYGWRCTTNENTYSNRTLMGNWNQERYDLRNIVQPKPLPSQFGHYFETTYDTSYNNKMPLSTHRFKREPHWFPGHQPELDPPRYKCTEKSTYMNSYSKP

SEQ ID NO: 110 - DNA, 1032 bp, Homo sapiens
ggcaagggggagtgtagagcagagcagaagcctgagccagacggagagccacctcctctcccaggaactgaacccaaaggatcacctggtattccctgagagtacagatttctccggcgtggccctcaagggacagacatggctcagcggatgacaacacagctgctgctccttctagtgtgggtggctgtagtaggggaggctcagacaaggattgcatgggccaggactgagcttctcaatgtctgcatgaacgccaagcaccacaaggaaaagccaggccccgaggacaagttgcatgagcagtgtcgaccctggaggaagaatgcctgctgttctaccaacaccagccaggaagcccataaggatgtttcctacctatatagattcaactggaaccactgtggagagatggcacctgcctgcaaacggcatttcatccaggacacctgcctctacgagtgctcccccaacttggggccctggatccagcaggtggatcagagctggcgcaaagagcgggtactgaacgtgcccctgtgcaaagaggactgtgagcaatggtgggaagattgtcgcacctcctacacctgcaagagcaactggcacaagggctggaactggacttcagggtttaacaagtgcgcagtgggagctgcctgccaacctttccatttctacttccccacacccactgttctgtgcaatgaaatctggactcactcctacaaggtcagcaactacagccgagggagtggccgctgcatccagatgtggttcgacccagcccagggcaaccccaatgaggaggtggcgaggttctatgctgcagccatgagtggggctgggccctgggcagcctggcctttcctgcttagcctggccctaatgctgctgtggctgctcagctgacctccttttaccttctgatacctggaaatccctgccctgttcagccccacagctcccaactatttggttcctgctccatggtcgggcctctgacagccactttgaataaaccagacaccg

SEQ ID NO: 111 - protein, 257 aa, Homo sapiens
MAQRMTTQLLLLLVWVAVVGEAQTRIAWARTELLNVCMNAKHHKEKPGPEDKLHEQCRPWRKNACCSTNTSQEAHKDVSYLYRFNWNHCGEMAPACKRHFIQDTCLYECSPNLGPWIQQVDQSWRKERVLNVPLCKEDCEQWWEDCRTSYTCKSNWHKGWNWTSGFNKCAVGAACQPFHFYFPTPTVLCNEIWTHSYKVSNYSRGSGRCIQMWFDPAQGNPNEEVARFYAAAMSGAGPWAAWPFLLSLALMLLWLLS

SEQ ID NO: 112 - DNA, 1104 bp, Homo sapiens
tggaggcctggctggtgctcacatacaataattaactgctgagtggccttcgcccaatcccaggctccactcctgggctccattcccactccctgcctgtctcctaggccactaaaccacagctgtcccctggaataaggcaagggggagtgtagagcagagcagaagcctgagccagacggagagccacctcctctcccagggacagacatggctcagcggatgacaacacagctgctgctccttctagtgtgggtggctgtagtaggggaggctcagacaaggattgcatgggccaggactgagcttctcaatgtctgcatgaacgccaagcaccacaaggaaaagccaggccccgaggacaagttgcatgagcagtgtcgaccctggaggaagaatgcctgctgttctaccaacaccagccaggaagcccataaggatgtttcctacctatatagattcaactggaaccactgtggagagatggcacctgcctgcaaacggcatttcatccaggacacctgcctctacgagtgctcccccaacttggggccctggatccagcaggtggatcagagctggcgcaaagagcgggtactgaacgtgcccctgtgcaaagaggactgtgagcaatggtgggaagattgtcgcacctcctacacctgcaagagcaactggcacaagggctggaactggacttcagggtttaacaagtgcgcagtgggagctgcctgccaacctttccatttctacttccccacacccactgttctgtgcaatgaaatctggactcactcctacaaggtcagcaactacagccgagggagtggccgctgcatccagatgtggttcgacccagcccagggcaaccccaatgaggaggtggcgaggttctatgctgcagccatgagtggggctgggccctgggcagcctggcctttcctgcttagcctggccctaatgctgctgtggctgctcagctgacctccttttaccttctgatacctggaaatccctgccctgttcagccccacagctcccaactatttggttcctgctccatggtcgggcctctgacagccactttgaataaaccagacaccg

SEQ ID NO: 113 - DNA, 939 bp, Homo sapiens
cattccttggtgccactgaccacagctctttcttcagggacagacatggctcagcggatgacaacacagctgctgctccttctagtgtgggtggctgtagtaggggaggctcagacaaggattgcatgggccaggactgagcttctcaatgtctgcatgaacgccaagcaccacaaggaaaagccaggccccgaggacaagttgcatgagcagtgtcgaccctggaggaagaatgcctgctgttctaccaacaccagccaggaagcccataaggatgtttcctacctatatagattcaactggaaccactgtggagagatggcacctgcctgcaaacggcatttcatccaggacacctgcctctacgagtgctcccccaacttggggccctggatccagcaggtggatcagagctggcgcaaagagcgggtactgaacgtgcccctgtgcaaagaggactgtgagcaatggtgggaagattgtcgcacctcctacacctgcaagagcaactggcacaagggctggaactggacttcagggtttaacaagtgcgcagtgggagctgcctgccaacctttccatttctacttccccacacccactgttctgtgcaatgaaatctggactcactcctacaaggtcagcaactacagccgagggagtggccgctgcatccagatgtggttcgacccagcccagggcaaccccaatgaggaggtggcgaggttctatgctgcagccatgagtggggctgggccctgggcagcctggcctttcctgcttagcctggccctaatgctgctgtggctgctcagctgacctccttttaccttctgatacctggaaatccctgccctgttcagccccacagctcccaactatttggttcctgctccatggtcgggcctctgacagccactttgaataaaccagacaccg

SEQ ID NO: 114 - DNA, 1331 bp, Homo sapiens
ggaaaggattttctcagcccccatccccagcactgtgtgttggccgcacccatgagagcctcagcactctgaaggtgcagggggcaaaggccaaaagagctctggcctgaacttgggtggtccctactgtgtgacttggggcatggccctcatctgtgctgaaatgattccacaaagattaaactggctatcatttgttgatttcccccttcttacatttaatccttgcaggagaaagctaagcctcaagatagtttgcttctctttcccccaaggccaaggagaaggtggagtgagggctggggtcgggacaggttgaacgggaaccctgtgctctaaacagttagggtttgttcccgcaggaactgaacccaaaggatcacctggtattccctgagagtacagatttctccggcgtggccctcaagggacagacatggctcagcggatgacaacacagctgctgctccttctagtgtgggtggctgtagtaggggaggctcagacaaggattgcatgggccaggactgagcttctcaatgtctgcatgaacgccaagcaccacaaggaaaagccaggccccgaggacaagttgcatgagcagtgtcgaccctggaggaagaatgcctgctgttctaccaacaccagccaggaagcccataaggatgtttcctacctatatagattcaactggaaccactgtggagagatggcacctgcctgcaaacggcatttcatccaggacacctgcctctacgagtgctcccccaacttggggccctggatccagcaggtggatcagagctggcgcaaagagcgggtactgaacgtgcccctgtgcaaagaggactgtgagcaatggtgggaagattgtcgcacctcctacacctgcaagagcaactggcacaagggctggaactggacttcagggtttaacaagtgcgcagtgggagctgcctgccaacctttccatttctacttccccacacccactgttctgtgcaatgaaatctggactcactcctacaaggtcagcaactacagccgagggagtggccgctgcatccagatgtggttcgacccagcccagggcaaccccaatgaggaggtggcgaggttctatgctgcagccatgagtggggctgggccctgggcagcctggcctttcctgcttagcctggccctaatgctgctgtggctgctcagctgacctccttttaccttctgatacctggaaatccctgccctgttcagccccacagctcccaactatttggttcctgctccatggtcgggcctctgacagccactttgaataaaccagacaccgc

SEQ ID NO: 115 - DNA, 929 bp, Homo sapiens
agggacagacatggctcagcggatgacaacacagctgctgctccttctagtgtgggtggctgtagtaggggaggctcagacaaggattgcatgggccaggactgagcttctcaatgtctgcatgaacgccaagcaccacaaggaaaagccaggccccgaggacaagttgcatgagcagtgtcgaccctggaggaagaatgcctgctgttctaccaacaccagccaggaagcccataaggatgtttcctacctatatagattcaactggaaccactgtggagagatggcacctgcctgcaaacggcatttcatccaggacacctgcctctacgagtgctcccccaacttggggccctggatccagcaggtggatcagagctggcgcaaagagcgggtactgaacgtgcccctgtgcaaagaggactgtgagcaatggtgggaagattgtcgcacctcctacacctgcaagagcaactggcacaagggctggaactggacttcagggtttaacaagtgcgcagtgggagctgcctgccaacctttccatttctacttccccacacccactgttctgtgcaatgaaatctggactcactcctacaaggtcagcaactacagccgagggagtggccgctgcatccagatgtggttcgacccagcccagggcaaccccaatgaggaggtggcgaggttctatgctgcagccatgagtggggctgggccctgggcagcctggcctttcctgcttagcctggccctaatgctgctgtggctgctcagctgacctccttttaccttctgatacctggaaatccctgccctgttcagccccacagctcccaactatttggttcctgctccatggtcgggcctctgacagccactttgaataaaccagacaccgcacatgtgtcttgagaattatttgg

SEQ ID NO: 116 - DNA, 858 bp, Homo sapiens
agagcctggacctacagcgctgttggtggaggtcctgcctccaggaatagatggacatggcctggcagatgatgcagctgctgcttctggctttggtgactgctgcggggagtgcccagcccaggagtgcgcgggccaggacggacctgctcaatgtctgcatgaacgccaagcaccacaagacacagcccagccccgaggacgagctgtatggccagtgcagtccctggaagaagaatgcctgctgcacggccagcaccagccaggagctgcacaaggacacctcccgcctgtacaactttaactgggatcactgtggtaagatggaacccacctgcaagcgccactttatccaggacagctgtctctatgagtgctcacccaacctggggccctggatccggcaggtcaaccagagctggcgcaaagagcgcattctgaacgtgcccctgtgcaaagaggactgtgagcgctggtgggaggactgtcgcacctcctacacctgcaaaagcaactggcacaaaggctggaattggacctcagggattaatgagtgtccggccggggccctctgcagcacctttgagtcctacttccccactccagccgccctttgtgaaggcctctggagccactccttcaaggtcagcaactatagtcgagggagcggccgctgcatccagatgtggtttgactcagcccagggcaaccccaatgaggaggtggccaagttctatgctgcggccatgaatgctggggccccgtctcgtgggattattgattcctgatccaagaagggtcctctggggttcttccaacaacctattctaatagacaaatccacatgaaaaaaaaaaa

SEQ ID NO: 117 - protein, 243 aa, Homo sapiens
MAWQMMQLLLLALVTAAGSAQPRSARARTDLLNVCMNAKHHKTQPSPEDELYGQCSPWKKNACCTASTSQELHKDTSRLYNFNWDHCGKMEPTCKRHFIQDSCLYECSPNLGPWIRQVNQSWRKERILNVPLCKEDCERWWEDCRTSYTCKSNWHKGWNWTSGINECPAGALCSTFESYFPTPAALCEGLWSHSFKVSNYSRGSGRCIQMWFDSAQGNPNEEVAKFYAAAMNAGAPSRGIIDS

SEQ ID NO: 118 - DNA, 1362 bp, Homo sapiens
atggcttcacccagcctcccgggcagtgactgctcccaaatcattgatcacagtcatgtccccgagtttgaggtggccacctggatcaaaatcacccttattctggtgtacctgatcatcttcgtgatgggccttctggggaacagcgccaccattcgggtcacccaggtgctgcagaagaaaggatacttgcagaaggaggtgacagaccacatggtgagtttggcttgctcggacatcttggtgttcctcatcggcatgcccatggagttctacagcatcatctggaatcccctgaccacgtccagctacaccctgtcctgcaagctgcacactttcctcttcgaggcctgcagctacgctacgctgctgcacgtgctgacactcagctttgagcgctacatcgccatctgtcaccccttcaggtacaaggctgtgtcgggaccttgccaggtgaagctgctgattggcttcgtctgggtcacctccgccctggtggcactgcccttgctgtttgccatgggtactgagtaccccctggtgaacgtgcccagccaccggggtctcacttgcaaccgctccagcacccgccaccacgagcagcccgagacctccaatatgtccatctgtaccaacctctccagccgctggaccgtgttccagtccagcatcttcggcgccttcgtggtctacctcgtggtcctgctctccgtagccttcatgtgctggaacatgatgcaggtgctcatgaaaagccagaagggctcgctggccgggggcacgcggcctccgcagctgaggaagtccgagagcgaagagagcaggaccgccaggaggcagaccatcatcttcctgaggctgattgttgtgacattggccgtatgctggatgcccaaccagattcggaggatcatggctgcggccaaacccaagcacgactggacgaggtcctacttccgggcgtacatgatcctcctccccttctcggagacgtttttctacctcagctcggtcatcaacccgctcctgtacacggtgtcctcgcagcagtttcggcgggtgttcgtgcaggtgctgtgctgccgcctgtcgctgcagcacgccaaccacgagaagcgcctgcgcgtacatgcgcactccaccaccgacagcgcccgctttgtgcagcgcccgttgctcttcgcgtcccggcgccagtcctctgcaaggagaactgagaagattttcttaagcacttttcagagcgaggccgagccccagtctaagtcccagtcattgagtctcgagtcactagagcccaactcaggcgcgaaaccagccaattctgctgcagagaatggttttcaggagcatgaagtttga

SEQ ID NO: 119 - protein, 453 aa, Homo sapiens
MASPSLPGSDCSQIIDHSHVPEFEVATWIKITLILVYLIIFVMGLLGNSATIRVTQVLQKKGYLQKEVTDHMVSLACSDILVFLIGMPMEFYSIIWNPLTTSSYTLSCKLHTFLFEACSYATLLHVLTLSFERYIAICHPFRYKAVSGPCQVKLLIGFVWVTSALVALPLLFAMGTEYPLVNVPSHRGLTCNRSSTRHHEQPETSNMSICTNLSSRWTVFQSSIFGAFVVYLVVLLSVAFMCWNMMQVLMKSQKGSLAGGTRPPQLRKSESEESRTARRQTIIFLRLIVVTLAVCWMPNQIRRIMAAAKPKHDWTRSYFRAYMILLPFSETFFYLSSVINPLLYTVSSQQFRRVFVQVLCCRLSLQHANHEKRLRVHAHSTTDSARFVQRPLLFASRRQSSARRTEKIFLSTFQSEAEPQSKSQSLSLESLEPNSGAKPANSAAENGFQEHEV

SEQ ID NO: 120 - DNA, 2870 bp, Homo sapiens
aggtcgcaggcgggcgtgcgtggagcgggggccgcggccgcgccgcagagatgtgactcgggccgaaggccagctggagcgtcggcgctgcggggccgcgggggtcgaatgttcgtggcatcagagagaaagatgagagctcaccaggtgctcaccttcctcctgctcttcgtgatcacctcggtggcctctgaaaacgccagcacatcccgaggctgtgggctggacctcctccctcagtacgtgtccctgtgcgacctggacgccatctggggcattgtggtggaggcggtggccggggcgggcgccctgatcacactgctcctgatgctcatcctcctggtgcggctgcccttcatcaaggagaaggagaagaagagccctgtgggcctccactttctgttcctcctggggaccctgggcctctttgggctgacgtttgccttcatcatccaggaggacgagaccatctgctctgtccgccgcttcctctggggcgtcctctttgcgctctgcttctcctgcctgctgagccaggcatggcgcgtgcggaggctggtgcggcatggcacgggccccgcgggctggcagctggtgggcctggcgctgtgcctgatgctggtgcaagtcatcatcgctgtggagtggctggtgctcaccgtgctgcgtgacacaaggccagcctgcgcctacgagcccatggactttgtgatggccctcatctacgacatggtactgcttgtggtcaccctggggctggccctcttcactctgtgcggcaagttcaagaggtggaagctgaacggggccttcctcctcatcacagccttcctctctgtgctcatctgggtggcctggatgaccatgtacctcttcggcaatgtcaagctgcagcagggggatgcctggaacgaccccaccttggccatcacgctggcggccagcggctgggtcttcgtcatcttccacgccatccctgagatccactgcacccttctgccagccctgcaggagaacacgcccaactacttcgacacgtcgcagcccaggatgcgggagacggccttcgaggaggacgtgcagctgccgcgggcctatatggagaacaaggccttctccatggatgaacacaatgcagctctccgaacagcaggatttcccaacggcagcttgggaaaaagacccagtggcagcttggggaaaagacccagcgctccgtttagaagcaacgtgtatcagccaactgagatggccgtcgtgctcaacggtgggaccatcccaactgctccgccaagtcacacaggaagacacctttggtgaaagactttaagttccagagaatcagaatttctcttaccgatttgcctccctggctgtgtctttcttgagggagaaatcggtaacagttgccgaaccaggccgcctcacagccaggaaatttggaaatcctagccaaggggatttcgtgtaaatgtgaacactgacgaactgaaaagctaacaccgactgcccgcccctcccctgccacacacacagacacgtaataccagaccaacctcaatccccgcaaactaaagcaaagctaattgcaaatagtattaggctcactggaaaatgtggctgggaagactgtttcatcctctgggggtagaacagaaccaaattcacagctggtgggccagactggtgttggttggaggtggggggctcccactcttatcacctctccccagcaagtgctggaccccaggtagcctcttggagatgaccgttgcgttgaggacaaatggggactttgccaccggcttgcctggtggtttgcacatttcaggggggtcaggagagttaaggaggttgtgggtgggattccaaggtgaggcccaactgaatcgtggggtgagctttatagccagtagaggtggagggaccctggcatgtgccaaagaagaggccctctgggtgatgaagtgaccatcacatttggaaagtgatcaaccactgttccttctatggggctcttgctctaatgtctatggtgagaacacaggccccgccccttcccttgtagagccatagaaatattctggcttggggcagcagtcccttcttcccttgatcatctcgccctgttcctacacttacgggtgtatctccaaatcctctcccaattttattcccttattcatttcaagagctccaatggggtctccagctgaaagcccctccgggaggcaggttggaaggcaggcaccacggcaggttttccgcgatgatgtcacctagcagggcttcaggggttcccactaggatgcagagatgacctctcgctgcctcacaagcagtgacacctcgggtcctttccgttgctatggtgaaaattcctggatggaatggatcacatgagggtttcttgttgcttttggagggtgtgggggatattttgttttggtttttctgcaggttccatgaaaacagcccttttccaagcccattgtttctgtcatggtttccatctgtcctgagcaagtcattcctttgttatttagcatttcgaacatctcggccattcaaagcccccatgttctctgcactgtttggccagcataacctctagcatcgattcaaagcagagttttaacctgacggcatggaatgtataaatgagggtgggtccttctgcagatactctaatcactacattgctttttctataaaactacccataagcctttaacctttaaagaaaaatgaaaaaggttagtgtttgggggccgggggaggactgaccgcttcataagccagtacgtctgagctgagtatgtttcaataaaccttttgatatttctcaaaaaaaaaaaaaaaaaaaaaaa

SEQ ID NO: 121 - protein, 403 aa, Homo sapiens
MFVASERKMRAHQVLTFLLLFVITSVASENASTSRGCGLDLLPQYVSLCDLDAIWGIVVEAVAGAGALITLLLMLILLVRLPFIKEKEKKSPVGLHFLFLLGTLGLFGLTFAFIIQEDETICSVRRFLWGVLFALCFSCLLSQAWRVRRLVRHGTGPAGWQLVGLALCLMLVQVIIAVEWLVLTVLRDTRPACAYEPMDFVMALIYDMVLLVVTLGLALFTLCGKFKRWKLNGAFLLITAFLSVLIWVAWMTMYLFGNVKLQQGDAWNDPTLAITLAASGWVFVIFHAIPEIHCTLLPALQENTPNYFDTSQPRMRETAFEEDVQLPRAYMENKAFSMDEHNAALRTAGFPNGSLGKRPSGSLGKRPSAPFRSNVYQPTEMAVVLNGGTIPTAPPSHTGRHLW

SEQ ID NO: 122 - DNA, 1474 bp, Homo sapiens
ccatgctgccttccgggcagtaccatccatctccacaccctggaagacacagtgagttagcaccaccaccaggtaattggccttatcagctctgtgcctgtctccagtcaggctggaataagtctcctcatatgtgcaagctcggccctcccctggaatctaaagcctcctcagccttctgagtcagcctgaaaggaacaggccgaactgctgtatgggctctactgccagtgtgacctcaccctctccagtcacccctcctcagttccagctatgagttcctgcaacttcacacatgccacctgtgtgcttattggtatcccaggattagagaaagcccatttctgggttggcttccccctcctttccatgtatgtagtggcaatgtgtggaaactgcatcgtggtcttcatcgtaaggacggaacgcagcctgcacgctccgatgtacctctttctctgcatgcttgcagccattgacctggccttatccacatccaccatgcctaagatccttgcccttttctggtttgattcccgagagattagcattgaggcctgtcttacccagatgttctttattcatgccctctcagccattgaatccaccatcctgctggccatggcctttgaccgttatgtggccatctgccacccactgcgccatgctgcagtgctcaacaatacagtaacagcccagattggcatcgtggctgtggtccgcggatccctcttttttttcccactgcctctgctgatcaagcggctggccttctgccactccaatgtcctctcgcactcctattgtgtccaccaggatgtaatgaagttggcctatgcagacactttgcccaatgtggtatatggtcttactgccattctgctggtcatgggcgtggacgtaatgttcatctccttgtcctattttctgataatacgaacggttctgcaactgccttccaagtcagagcgggccaaggcctttggaacctgtgtgtcacacattggtgtggtactcgccttctatgtgccacttattggcctctcagttgtacaccgctttggaaacagccttcatcccattgtgcgtgttgtcatgggtgacatctacctgctgctgcctcctgtcatcaatcccatcatctatggtgccaaaaccaaacagatcagaacacgggtgctggctatgttcaagatcagctgtgacaaggacttgcaggctgtgggaggcaagtgacccttaacactacacttctccttatctttattggcttgataaacataattatttctaacactagcttatttccagttgcccataagcacatcagtacttttctctggctggaatagtaaactaaagtatggtacatctacctaaaggactattatgtggaataatacatactaatgaagtattacatgatttaaagactacaataaaaccaaacatgcttataacattaaaaaaaaaa

SEQ ID NO: 123 - protein, 320 aa, Homo sapiens
MSSCNFTHATCVLIGIPGLEKAHFWVGFPLLSMYVVAMCGNCIVVFIVRTERSLHAPMYLFLCMLAAIDLALSTSTMPKILALFWFDSREISIEACLTQMFFIHALSAIESTILLAMAFDRYVAICHPLRHAAVLNNTVTAQIGIVAVVRGSLFFFPLPLLIKRLAFCHSNVLSHSYCVHQDVMKLAYADTLPNVVYGLTAILLVMGVDVMFISLSYFLIIRTVLQLPSKSERAKAFGTCVSHIGVVLAFYVPLIGLSVVHRFGNSLHPIVRVVMGDIYLLLPPVINPIIYGAKTKQIRTRVLAMFKISCDKDLQAVGGK

SEQ ID NO: 124 - DNA, 2205 bp, Homo sapiens
cacagggctcccccccgcctctgacttctctgtccgaagtcgggacaccctcctaccacctgtagagaagcgggagtggatctgaaataaaatccaggaatctgggggttcctagacggagccagacttcggaacgggtgtcctgctactcctgctggggctcctccaggacaagggcacacaactggttccgttaagcccctctctcgctcagacgccatggagctggatctgtctccacctcatcttagcagctctccggaagacctttggccagcccctgggacccctcctgggactccccggccccctgatacccctctgcctgaggaggtaaagaggtcccagcctctcctcatcccaaccaccggcaggaaacttcgagaggaggagaggcgtgccacctccctcccctctatccccaaccccttccctgagctctgcagtcctccctcacagagcccaattctcgggggcccctccagtgcaagggggctgctcccccgcgatgccagccgcccccatgtagtaaaggtgtacagtgaggatggggcctgcaggtctgtggaggtggcagcaggtgccacagctcgccacgtgtgtgaaatgctggtgcagcgagctcacgccttgagcgacgagacctgggggctggtggagtgccacccccacctagcactggagcggggtttggaggaccacgagtccgtggtggaagtgcaggctgcctggcccgtgggcggagatagccgcttcgtcttccggaaaaacttcgccaagtacgaactgttcaagagctccccacactccctgttcccagaaaaaatggtctccagctgtctcgatgcacacactggtatatcccatgaagacctcatccagaacttcctgaatgctggcagctttcctgagatccagggctttctgcagctgcggggttcaggacggaagctttggaaacgctttttctgtttcttgcgccgatctggcctctattactccaccaagggcacctctaaggatccgaggcacctgcagtacgtggcagatgtgaacgagtccaacgtgtacgtggtgacgcagggccgcaagctctacgggatgcccactgacttcggtttctgtgtcaagcccaacaagcttcgaaatggacacaaggggcttcggatcttctgcagtgaagatgagcagagccgcacctgctggctggctgccttccgcctcttcaagtacggggtgcagctgtacaagaattaccagcaggcacagtctcgccatctgcatccatcttgtttgggctccccacccttgagaagtgcctcagataataccctggtggccatggacttctctggccatgctgggcgtgtcattgagaacccccgggaggctctgagtgtggccctggaggaggcccaggcctggaggaagaagacaaaccaccgcctcagcctgcccatgccagcctccggcacgagcctcagtgcagccatccaccgcacccaactctggttccacgggcgcatttcccgtgaggagagccagcggcttattggacagcagggcttggtagacggcctgttcctggtccgggagagtcagcggaacccccagggctttgtcctctctttgtgccacctgcagaaagtgaagcattatctcatcctgccgagcgaggaggagggtcgcctgtacttcagcatggatgatggccagacccgcttcactgacctgctgcagctcgtggagttccaccagctgaaccgcggcatcctgccgtgcttgctgcgccattgctgcacgcgggtggccctctgaccaggccgtggactggctcatgcctcagcccgccttcaggctgcccgccgcccctccacccatccagtggactctggggcgcggccacaggggacgggatgaggagcgggagggttccgccactccagttttctcctctgcttctttgcctccctcagatagaaaacagcccccactccagtccactcctgacccctctcctcaagggaaggccttgggtggccccctctccttctcctagctctggaggtgctgctctagggcagggaattatgggagaagtgggggcagcccaggcggtttcacgccccacactttgtacagaccgagaggccagttgatctgctctgttttatactagtgacaataaagattattttttgatac

SEQ ID NO: 125 - protein, 532 aa, Homo sapiens
MELDLSPPHLSSSPEDLWPAPGTPPGTPRPPDTPLPEEVKRSQPLLIPTTGRKLREEERRATSLPSIPNPFPELCSPPSQSPILGGPSSARGLLPRDASRPHVVKVYSEDGACRSVEVAAGATARHVCEMLVQRAHALSDETWGLVECHPHLALERGLEDHESVVEVQAAWPVGGDSRFVFRKNFAKYELFKSSPHSLFPEKMVSSCLDAHTGISHEDLIQNFLNAGSFPEIQGFLQLRGSGRKLWKRFFCFLRRSGLYYSTKGTSKDPRHLQYVADVNESNVYVVTQGRKLYGMPTDFGFCVKPNKLRNGHKGLRIFCSEDEQSRTCWLAAFRLFKYGVQLYKNYQQAQSRHLHPSCLGSPPLRSASDNTLVAMDFSGHAGRVIENPREALSVALEEAQAWRKKTNHRLSLPMPASGTSLSAAIHRTQLWFHGRISREESQRLIGQQGLVDGLFLVRESQRNPQGFVLSLCHLQKVKHYLILPSEEEGRLYFSMDDGQTRFTDLLQLVEFHQLNRGILPCLLRHCCTRVAL

SEQ ID NO: 126 - DNA, 1619 bp, Homo sapiens
agttctgcggtgccagggagtggagcagagctcagccccgtcccaaacacagatgggaccatgaactccggacacagcttcagccagaccccctcggcctccttccatggcgccggaggtggctggggccggcccaggagcttccccagggctcccaccgtccatggcggtgcggggggagcccgcatctccctgtccttcaccacgcggagctgcccaccccctggagggtcttggggttctggaagaagcagccccctactaggcggaaatgggaaggccaccatgcagaatctcaacgaccgcctggcctcctacctggagaaggttcgcgccctggaggaggccaacatgaagctggaaagccgcatcctgaaatggcaccagcagagagatcctggcagtaagaaagattattcccagtatgaggaaaacatcacacacctgcaggagcagatagtggatggtaagatgaccaatgctcagattattcttctcattgacaatgccaggatggcagtggatgacttcaacctcaagtatgaaaatgaacactcctttaagaaagacttggaaattgaagtcgagggcctccgaaggaccttagacaacctgaccattgtcacaacagacctagaacaggaggtggaaggaatgaggaaagagctcattctcatgaaggagcaccatgagcaggaaatggaggagcatcatgtgccaagtgacttcaatgtcaatgtgaaggtggatacaggtcccagggaagatctgattaaggtcctggaggatatgagacaagaatatgagcttataataaagaagaagcatcgagacttggacacttggtataaagaacagtctgcagccatgtcccaggaggcagccagtccagccactgtgcagagcagacaaggtgacatccacgaactgaagcgcacattccaggccctggagattgacctgcaggcacagtacagcacgaaatctgctttggaaaacatgttatccgagacccagtctcggtactcctgcaagctccaggacatgcaagagatcatctcccactatgaggaggaactgacgcagctacgccacgaactggagcggcagaacaatgaataccaagtgctgctgggcatcaaaacccacctggagaaggaaatcaccacgtaccgacggctcctggagggagagagtgaagggacacgggaagaatcaaagtcgagcatgaaagtgtctgcaactccaaagatcaaggccataacccaggagaccatcaacggaagattagttctttgtcaagtgaatgaaatccaaaagcacgcatgagaccaatgaaagtttccgcctgttgtaaagtctattttcccccaaggaaagtccttgcacagacaccagtgagtgagttctaaaagatacccttggaattatcagactcagaaacttttatttttttttttctgtaacagtctcaccagacttctcataatgctcttaatatattgcacttttctaatcaaagtgcgagtttatgagggtaaagctctactttcctactgcagccttcagattctcatcattttgcatctattttgtagccaataaaactccgcactagc

SEQ ID NO: 127 - protein, 422 aa, Homo sapiens
MNSGHSFSQTPSASFHGAGGGWGRPRSFPRAPTVHGGAGGARISLSFTTRSCPPPGGSWGSGRSSPLLGGNGKATMQNLNDRLASYLEKVRALEEANMKLESRILKWHQQRDPGSKKDYSQYEENITHLQEQIVDGKMTNAQIILLIDNARMAVDDFNLKYENEHSFKKDLEIEVEGLRRTLDNLTIVTTDLEQEVEGMRKELILMKEHHEQEMEEHHVPSDFNVNVKVDTGPREDLIKVLEDMRQEYELIIKKKHRDLDTWYKEQSAAMSQEAASPATVQSRQGDIHELKRTFQALEIDLQAQYSTKSALENMLSETQSRYSCKLQDMQEIISHYEEELTQLRHELERQNNEYQVLLGIKTHLEKEITTYRRLLEGESEGTREESKSSMKVSATPKIKAITQETINGRLVLCQVNEIQKHA

SEQ ID NO: 128 - DNA, 1359 bp, Homo sapiens
ctttttggtgtaaatctggactctaattctgtaatatatcaaggaatctcgtaaaaccgacactaaaacgtccctgcctacaaatcatccggccaaattatgagttcattgtattatgcgaatgctttattttctaaatatccagcctcaagttcggttttcgctaccggagccttcccagaacaaacttcttgtgcgtttgcttccaacccccagcgcccgggctatggagcgggttcgggcgcttccttcgccggctcgatgcagggcttgtaccccggcggggggggcatggcgggccagagcgcggccggcgtctacgcggccggctatgggctcgagccgagttccttcaacatgcactgcgcgccctttgagcagaacctctccggggtgtgtcccggcgactccgccaaggcggcgggcgccaaggagcagagggactcggacttggcggccgagagtaacttccggatctacccctcgatgcgaagctcaggaactgaccgcaaacgaggccgccagacctacacccgctaccagaccctggagctggagaaggaatttcactacaatcgctacctgacgcggcggcggcgcatcgagatcgcgcacgcgctctgcctcacggaaagacagatcaagatttggtttcagaaccggcgcatgaagtggaaaaaggagaacaagaccgcgggcccggggaccaccggccaagacagggctgaagcagaggaggaagaggaagagtgagggatggagaaagggcagaggaagagacatgagaaagggagacgaagagaagcccagctctgggaactgaatcaggaaactcaaatcgaatagggaagtaaaaaaacaaaacaaaaaacaaaaaaaaacaaaaaaaaaccctatttaaatgaaaggagtttaaaaacattttttaaggagggagaaaggagaaattttggtttttcaacactgaaaaaatagtacctataggaaagtctgtcaggtttggtttttttgtacaatatgaaaaggacattatctacctgttctgtagctttctggaatttacctccccttttctatgttgctattgtaaggtctttgtaaaatcttgcagttttgtaagccctctttaatgctgtctttgtggactgtgggtctggactaaccctgtggttgcctgccctcctgtgcctccgccttcccagcagcggcaccaaggggccttagggagccccaaaacctaccactcgcgtgttccccaagcgccttgctgctgctgcttgcttcccgtcccccagccccatgctccctttacattctgtgtgtatctaaaggatggaaaaataaaacgcaattaaaaat

SEQ ID NO: 129 - protein, 217 aa, Homo sapiens [sequence omitted]

SEQ ID NO: 130 - DNA, 1257 bp, Homo sapiens
gaggcgcgcgggtgaaaggcgcattgatgcagcctgcggcggcctcggagcgcggcggagcagacgctgaccacgttcctctcctcggtctcctccgcctccagctccgcgctgcccggcagccgggagccatgcgaccccagggccccgccgcctccccgcagcggctccgcggcctcctgctgctcctgctgctgcagctgcccgcgccgtcgagcgcctctgagatccccaaggggaagcaaaaggcgcagctccggcagagggaggtggtggacctgtataatggaatgtgcttacaagggccagcaggagtgcctggtcgagacgggagccctggggccaatggcattccgggtacacctgggatcccaggtcgggatggattcaaaggagaaaagggggaatgtctgagggaaagctttgaggagtcctggacacccaactacaagcagtgttcatggagttcattgaattatggcatagatcttgggaaaattgcggagtgtacatttacaaagatgcgttcaaatagtgctctaagagttttgttcagtggctcacttcggctaaaatgcagaaatgcatgctgtcagcgttggtatttcacattcaatggagctgaatgttcaggacctcttcccattgaagctataatttatttggaccaaggaagccctgaaatgaattcaacaattaatattcatcgcacttcttctgtggaaggactttgtgaaggaattggtgctggattagtggatgttgctatctgggttggcacttgttcagattacccaaaaggagatgcttctactggatggaattcagtttctcgcatcattattgaagaactaccaaaataaatgctttaattttcatttgctacctctttttttattatgccttggaatggttcacttaaatgacattttaaataagtttatgtatacatctgaatgaaaagcaaagctaaatatgtttacagaccaaagtgtgatttcacactgtttttaaatctagcattattcattttgcttcaatcaaaagtggtttcaatattttttttagttggttagaatactttcttcatagtcacattctctcaacctataatttggaatattgttgtggtcttttgttttttctcttagtatagcatttttaaaaaaatataaaagctaccaatctttgtacaatttgtaaatgttaagaattttttttatatctgttaaataaaaattatttccaacaacctta

SEQ ID NO: 131 - protein, 278 aa, Homo sapiens
MQPAAASERGGADADHVPLLGLLRLQLRAARQPGAMRPQGPAASPQRLRGLLLLLLLQLPAPSSASEIPKGKQKAQLRQREVVDLYNGMCLQGPAGVPGRDGSPGANGIPGTPGIPGRDGFKGEKGECLRESFEESWTPNYKQCSWSSLNYGIDLGKIAECTFTKMRSNSALRVLFSGSLRLKCRNACCQRWYFTFNGAECSGPLPIEAIIYLDQGSPEMNSTINIHRTSSVEGLCEGIGAGLVDVAIWVGTCSDYPKGDASTGWNSVSRIIIEELPK

SEQ ID NO: 132 - DNA, 1177 bp, Homo sapiens
cacgcgtccgaatttactttgttggacaaccacagctggggctaggaatggttcagaaggtttaaggccggaaagggaaatgaaggggcccggcgctaaccctctaaggacctgttttgcttctgtttaaaccaaatgggcagtctgtcattacacacaccctgggtcttcatatgtggccgccagtataatggaatgtgcttacaagggccagcaggagtgcctggtcgagacgggagccctggggccaatggcattccgggtacacctgggatcccaggtcgggatggattcaaaggagaaaagggggaatgtctgagggaaagctttgaggagtcctggacacccaactacaagcagtgttcatggagttcattgaattatggcatagatcttgggaaaattgcggagtgtacatttacaaagatgcgttcaaatagtgctctaagagttttgttcagtggctcacttcggctaaaatgcagaaatgcatgctgtcagcgttggtatttcacattcaatggagctgaatgttcaggacctcttcccattgaagctataatttatttggaccaaggaagccctgaaatgaattcaacaattaatattcatcgcacttcttctgtggaaggactttgtgaaggaattggtgctggattagtggatgttgctatctgggttggcacttgttcagattacccaaaaggagatgcttctactggatggaattcagtttctcgcatcattattgaagaactaccaaaataaatgctttaattttcatttgctacctctttttttattatgccttggaatggttcacttaaatgacattttaaataagtttatgtatacatctgaatgaaaagcaaagctaaatatgtttacagaccaaagtgtgatttcacactgtttttaaatctagcattattcattttgcttcaatcaaaagtggtttcaatattttttttagttggttagaatactttcttcatagtcacattctctcaacctataatttggaatattgttgtggtcttttgttttttctcttagtatagcatttttaaaaaaatataaaagctaccaatctttgtacaatttgtaaatgttaagaattttttttatatctgttaaataaaaattatttccaacaaccwwaaaaaaaaaaaaaagg

SEQ ID NO: 133 - protein, 210 aa, Homo sapiens
MGSLSLHTPWVFICGRQYNGMCLQGPAGVPGRDGSPGANGIPGTPGIPGRDGFKGEKGECLRESFEESWTPNYKQCSWSSLNYGIDLGKIAECTFTKMRSNSALRVLFSGSLRLKCRNACCQRWYFTFNGAECSGPLPIEAIIYLDQGSPEMNSTINIHRTSSVEGLCEGIGAGLVDVAIWVGTCSDYPKGDASTGWNSVSRIIIEELPK

SEQ ID NO: 134 - DNA, 1340 bp, Homo sapiens
agggagtcgacccacgcgtccggaagctccgggtgtcgcgggggcgggaggaattaagggagggagagaggcgcgcgggtgaaaggcgcattgatgcagcctgcggcggcctcggagcgcggcggagccagacgctgaccacgttcctctcctcggtctcctccgcctccagctccgcgctgcccggcagccgggagccatgcgaccccagggccccgccgcctccccgcagcggctccgcggcctcctgctgctcctgctgctgcagctgcccgcgccgtcgagcgcctctgagatccccaaggggaagcaaaaggcgcagctccggcagagggaggtggtggacctgtataatggaatgtgcttacaagggccagcaggagtgcctggtcgagacgggagccctggggccaatggcattccgggtacacctgggatcccaggtcgggatggattcaaaggagaaaagggggaatgtctgagggaaagctttgaggagtcctggacacccaactacaagcagtgttcatggagttcattgaattatggcatagatcttgggaaaattgcggagtgtacatttacaaagatgcgttcaaatagtgctctaagagttttgttcagtggctcacttcggctaaaatgcagaaatgcatgctgtcagcgttggtatttcacattcaatggagctgaatgttcaggacctcttcccattgaagctataatttatttggaccaaggaagccctgaaatgaattcaacaattaatattcatcgcacttcttctgtggaaggactttgtgaaggaattggtgctggattagtggatgttgctatctgggttggcacttgttcagattacccaaaaggagatgcttctactggatggaattcagtttctcgcatcattattgaagaactaccaaaataaatgctttaattttcatttgctacctctttttttattatgccttggaatggttcacttaaatgacattttaaataagtttatgtatacatctgaatgaaaagcaaagctaaatatgtttacagaccaaagtgtgatttcacactgtttttaaatctagcattattcattttgcttcaatcaaaagtggtttcaatattttttttagttggttagaatactttcttcatagtcacattctctcaacctataatttggaatattgttgtggtcttttgttttttctcttagtatagcatttttaaaaaaatataaaagctaccaatctttgtacaatttgtaaatgttaagaattttttttatatctgttaaataaaaattatttccaacaaccwwaaaaaaaaaaaaaagg

SEQ ID NO: 135 - protein, 243 aa, Homo sapiens
MRPQGPAASPQRLRGLLLLLLLQLPAPSSASEIPKGKQKAQLRQREVVDLYNGMCLQGPAGVPGRDGSPGANGIPGTPGIPGRDGFKGEKGECLRESFEESWTPNYKQCSWSSLNYGIDLGKIAECTFTKMRSNSALRVLFSGSLRLKCRNACCQRWYFTFNGAECSGPLPIEAIIYLDQGSPEMNSTINIHRTSSVEGLCEGIGAGLVDVAIWVGTCSDYPKGDASTGWNSVSRIIIEELPK

SEQ ID NO: 136 - DNA, 5519 bp, Homo sapiens
aagtactgactgttcaaagctcaggcaaaccatgcagatccacgtgttgttggaggaggcgctcccttcaggagaccacagagggggagtgactgtggctgaccatgtgggcagaggggctggcgggctggcccctgcgagaggcggactcagggctgctggatgctccgtccttggccgctttgatctggagccacgtgtcacccagagctttggcaaagtggtcgtccacggagcccgtgatggacacggagttgggtgccggctcgggctccttgtaattcttgcccaggctcctgcggaaatgctcctccaccacggggtcacaggtggtggcagcgctcggtggcctccggtagctggcaggcccgggcgcggcctcgtgccgaattcggcacgagggggtttcggcggccgggagggagttgtcggcgccgcggccgctgcggacggacgctcgcctgccggctgaggaaaaagaagcaactaacaaaacactgtgataataaggattattcagtatgcagtttgcaggatatccatgacgacattgaaaatgaattttttgtattcaccagatattcttatatgagaagatctattttaaacagtctaaatattttttcttctgttggaccagcatggcaggatttaagcgagggtatgatggaaagattgctggattatatgatctggataaaaccttgggtcgaggccattttgccgtggttaaacttgccaggcatgtctttacgggtgaaaaggtggcagtaaaagttattgacaagacaaaactggacactctagctactggtcatcttttccaggaagtgagatgcatgaaactagtgcagcatcctaacatcgtccgcctttatgaagttattgacacccagaccaaactatatcttattctagaacttggggatgaaggagatatgtttgattatataatgaaacatgaggagggtcttaatgaagacttgcccaagaagtattttgctcagatagttcatgctatatcttattgccataaactccatgtggttcacagagacttaaaaccagagaatgtagtcttctttgaaaaacaaggtcttgtaaagttgacagactttgggttcagcaacaaatttcaaccagggaagaagctcactacaagctgtggatctcttgcatattccgctccagaaattctgcttggtgatgagtatgatgcacctgcagtagatatttggagtctgggagtgatccttttcatgttggtgtgtgggcagccgccctttcaagaagccaatgacagtgaaacactgacaatgatcatggattgcaaatatacagtaccatcccatgtgtctaaagagtgtaaagacctaatcacacggatgctacagagagatcccaagagaagggcttctttagaagagattgaaaatcatccttggcttcagggagtggacccttcaccagctacaaagtataacattccccttgtgtcatacaaaaatctctcggaagaggagcacaacagcatcattcagcgcatggtgcttggggacatagcggatcgagacgccattgtagaagccctggaaaccaacaggtataaccatatcacagccacatacttcctgctggctgaaaggatcctgagagaaaagcaagagaaagaaatacagaccagatctgcaagcccgagcaatatcaaggcccagtttaggcagtcatggccaaccaaaattgatgtaccccaggaccttgaggatgacctcacggccactcctttgtcccacgcgactgtccctcagtctcctgctcgggctgctgacagtgtcctcaatggccacaggagcaaaggcctgtgtgactcagctaagaaagatgacctccctgagttggctggaccagcactctctacggtgccacccgcaagcttaaaacccacagccagtgggcggaagtgtctgttcagggtggaagaagatgaagaggaagatgaggaggacaagaaacccatgtccctctcaacacaagtggttttgcgccggaagccatctgtaaccaaccgcctgacatccaggaagagtgcgcccgtcctcaaccagatctttgaggaaggggaatctgatgatgagtttgacatggatgagaatctgcctcccaagttgagcaggttaaagatgaatatagcttctccaggtacagttcacaaacgctaccaccggaggaaaagtcagggccggggctccagctgcagtagttcggagaccagtgatgatgattctgaaagccggcggcggctcgataaagatagcgggttcacctactcctggcaccgacgggatagcagcgaggggccccctggcagtgagggggatggcgggggccagagcaagccgagcaatgccagtggaggggtggacaaggccagccccagtgagaacaatgctggtgggggcagtccctccagcggctcgggtggcaaccccaccaatacatcgggtaccacacgccgctgtgccggccccagcaactccatgcagctggcctctcgcagtgctggggagctcgttgagagcctcaaactcatgagcctctgcctcggctcccagcttcatgggagcaccaagtacattattgatccacagaatggcttgtcattttccagtgtgaaagtccaagagaaatctacgtggaaaatgtgcattagctccacagggaatgcagggcaggtccctgcagtgggcggcataaagtttttctctgaccacatggcagataccaccactgaattggaacggataaagagcaagaacctgaaaaataacgtgctgcagctacctctgtgcgaaaagaccatctctgtgaacatccagcggaaccctaaggaggggctgctgtgcgcatccagcccagccagctgttgccatgtcatctgactgtggccccatctggccgctagcacgcttcctgctcagagcagtgaagaccggctcacttcactgttccatttggttttactattttaaagtgggcgttaggagcaattatttattacctttccatttgttcgcctgatgatgtgacaatgcatggtctttgtgcatgctgctagacacttttctttcccagccgaaaagcctattatgtaatttttacattcataattttaatgtggatgatcaggattaaatcaagatatatatctggaacctcttataaatggagcacttagaaatttgttgttctgcacttaacctagagagagaaaaaatgcttttctttgtgaaaaatctgaattcctgtcctgaccttctgtgatgtggaaaccctaggctctgagacacactctctggtgtctgagacagaaccaaagcaataacgttgtgatgcccacaggcctggagccagctagcgaccttgtgccgcccagctgtccatggcccgtgcagagcagaggacagtgagtgtctgcactgagaaccttaaaccacagttgaacatacccacacctgtttgtcttaagctatagtgtaaaaacaaagtttgggctctgaaaatttaactgaaaaagatttccttgtttttgtaataggtgagataaagtacttagatttataaggcagcttcccctgtagtgataaattacaagcagacaatcttattttgtaatgtgatgaagtgatgatgtcttaactctacttagagagtgtatgtctgtctaacagaacaaaaagatgctctgtgtaaattccttcctgtagggcacactgcaggatttccatgtagatagaagaactatagggcctagtacagaaggtgcacacaaatgttggcaaagtcaaaccccatgaattaaaacctactggaatttggtttttaggagtttggtaattagattatctcttttgttattttcattcagttatatcctttggctcagctagctttgaaattggctgatgaaaaaatatacataaaagggtaaaattcacacatacagcaaacaaaaatgcacaaagcctgcttcgtaacttttttttctggaattgtttttcactttgcctttttctgccaaaacaataatcaaagaactcttgctttaacctattcctgtacaaagactgtttttgaccagataatcatctgttgtggcattctatcttgtaggacactgtatattgcaaattgctgattatggaaggggccagttgctgttttttcatgcagtgccctgggagtcttaaaagcagtgcttagcaacattggtgatagcatgtggctgggacccagggcccttccccactcttcagccccgagtcatgtgtctgaggtgacggactgagacgcatctggtcctgtaattcagagagtgggcacatcaccaaagaactgcattgctgtggtcactgtttcttcaagtacacactgactctgctactttaggataaatatattttactcagaactctgaatttcacagtatacttactaaactaagtaaaaatgatacttaaaatacttattttactttctagacctaggctagatgttttaagctacagctctagttcattgtgatatttataatttgaaagctatgagaatagatgtgtgggtgaagccatagaacatatttgcttgaaattcttgagcagggatcttataaagggccagaaataagatgtgtggttcacatagatagtgagcgtaacatctgtattaaacataggagagaagtttataaagggcattggcaataaactctttgttgcagctgttttccaagcagtgtaaatactttttcctgtgattatgtatagccttggaatggcaccttttaactaacccatatgtgtttggtttcaatggttttttatattcagatgtatatatggtgctcactttaggatcagcagtgttgaccatttatgctgcatagctgtattatagccttattagttgtgtggttgacccttggggtatacaaatgtcagtctgagtggtgtcttactcctttgtttataagtgaatgattgtgcatgttttgtatgtcatagtatgtcgtcacataaaagggagggagcgaaaaaccattacattaagataatattggaccaaactacttacttgctctaaacagttacttgtaccccttaacctgtcttcaaaagttgcatatagttacagtagtgtataaattaaatattgtggaaaaacagtcttgtatttttctgtatgtgtgtatatatatataattatgtacttctggcaattctatctgtatttaaagatgtgacaatcttgacaccaattttaagaatagctgtgagaccgaattaaagataatccctaccaagtgaaaattgatgtgtgttaagagggtacagaattatcaactgatttggtcagttgcttccaatgctggttgatttccctcattgtgtaaacattgacaggtatgtgacaaatgggaaaaaaaatccaaataataaagtgacatattggtgttcagcaat

SEQ ID NO: 137 - protein, 765 aa, Homo sapiens
MAGFKRGYDGKIAGLYDLDKTLGRGHFAVVKLARHVFTGEKVAVKVIDKTKLDTLATGHLFQEVRCMKLVQHPNIVRLYEVIDTQTKLYLILELGDEGDMFDYIMKHEEGLNEDLPKKYFAQIVHAISYCHKLHVVHRDLKPENVVFFEKQGLVKLTDFGFSNKFQPGKKLTTSCGSLAYSAPEILLGDEYDAPAVDIWSLGVILFMLVCGQPPFQEANDSETLTMIMDCKYTVPSHVSKECKDLITRMLQRDPKRRASLEEIENHPWLQGVDPSPATKYNIPLVSYKNLSEEEHNSIIQRMVLGDIADRDAIVEALETNRYNHITATYFLLAERILREKQEKEIQTRSASPSNIKAQFRQSWPTKIDVPQDLEDDLTATPLSHATVPQSPARAADSVLNGHRSKGLCDSAKKDDLPELAGPALSTVPPASLKPTASGRKCLFRVEEDEEEDEEDKKPMSLSTQVVLRRKPSVTNRLTSRKSAPVLNQIFEEGESDDEFDMDENLPPKLSRLKMNIASPGTVHKRYHRRKSQGRGSSCSSSETSDDDSESRRRLDKDSGFTYSWHRRDSSEGPPGSEGDGGGQSKPSNASGGVDKASPSENNAGGGSPSSGSGGNPTNTSGTTRRCAGPSNSMQLASRSAGELVESLKLMSLCLGSQLHGSTKYIIDPQNGLSFSSVKVQEKSTWKMCISSTGNAGQVPAVGGIKFFSDHMADTTTELERIKSKNLKNNVLQLPLCEKTISVNIQRNPKEGLLCASSPASCCHVI

SEQ ID NO: 138 - DNA, 2029 bp, Homo sapiens
gagaagagagtcgaggacctccatgtaggtgccacggtggcccccagcagcagaagggactttacctttgacctctacagggccttggcttccgctgcccccagccagaacatcttcttctcccctgtgagcatctccatgagcctggccatgctctccctgggggctgggtccagcacaaagatgcagatcctggagggcctgggcctcaacctccagaaaagctcagagaaggagctgcacagaggctttcagcagctccttcaggaactcaaccagcccagagatggcttccagctgagcctcggcaatgcccttttcaccgacctggtggtagacctgcaggacaccttcgtaagtgccatgaagacgctgtacctggcagacactttccccaccaactttagggactctgcaggggccatgaagcagatcaatgattatgtggcaaagcaaacgaagggcaagattgtggacttgcttaagaacctcgatagcaatgcggtcgtgatcatggtgaattacatcttctttaaagctaagtgggagacaagcttcaaccacaaaggcacccaagagcaagacttctacgtgacctcggagactgtggtgcgggtacccatgatgagccgcgaggatcagtatcactacctcctggaccggaacctctcctgcagggtggtgggggtcccctaccaaggcaatgccacggctttgttcattctccccagtgagggaaagatgcagcaggtggagaatggactgagtgagaaaacgctgaggaagtggcttaagatgttcaaaaagaggcagctcgagctttaccttcccaaattctccattgagggctcctatcagctggagaaagtcctccccagtctggggatcagtaacgtcttcacctcccatgctgatctgtccggcatcagcaaccactcaaatatccaggtgtctgagatggtgcacaaagctgtggtggaggtggacgagtcgggaaccagagcagcggcagccacggggacaatcttcactttcaggtcggcccgcctgaactctcagaggctagtgttcaacaggccctttctgatgttcattgtggataacaacatcctcttccttggcaaagtgaaccgcccctgaggtggggcttctcctgaaatctacaggcctcagggtgggagatgaagggggctatgctatggcccatctgtatgctggtagctagtgatttacacaggtttagttgactaatgaggcattacaaataatattactctatgatgattgcttccacccacacgactgcaacatacaggtgccttggggaaatgtggagaacattcaatcttgccgtcactattcatcaatgaagattagcactgagatccagagaggctggatgacttgctcaagttcaccagcatggtagtggcaaagagaggtccagagtcctggcccttgatgcccagctcagtgccacaaagctcagtaggagggatgttccagtggatgagggccaccaggaagcacaggtccaaggctggtcccacacttatcagcagcaacaactgtcagttcatcctgcatgggaaaaatgttggaatgggagtctgaaatggggctactgtttcagtcctaacgtgctgtgtgacattgggacaacactttccctctctggacctcagtttccctctgtatacaaggatcagattcttgctgtgacccaagaactcctgaaatcatatagaaaggctggggtgggccctgtcattcgtggttgatttcaatacactcaagtgccattcatcctttaagaaaaacatctggatatcaaggtggaaatggcccatttaatgattgattatatcattttgtggatatagttataatctgatgggcctggctgggagtggaagaagggaagccttttgcaaatagtagagtgtcagttgcaggtgccaatgactaactttttgaattctatgttggcattaacaataaagcattttgcaaacactgaaaaaaaaaa

SEQ ID NO: 139 - protein, 379 aa, Homo sapiens
EKRVEDLHVGATVAPSSRRDFTFDLYRALASAAPSQNIFFSPVSISMSLAMLSLGAGSSTKMQILEGLGLNLQKSSEKELHRGFQQLLQELNQPRDGFQLSLGNALFTDLVVDLQDTFVSAMKTLYLADTFPTNFRDSAGAMKQINDYVAKQTKGKIVDLLKNLDSNAVVIMVNYIFFKAKWETSFNHKGTQEQDFYVTSETVVRVPMMSREDQYHYLLDRNLSCRVVGVPYQGNATALFILPSEGKMQQVENGLSEKTLRKWLKMFKKRQLELYLPKFSIEGSYQLEKVLPSLGISNVFTSHADLSGISNHSNIQVSEMVHKAVVEVDESGTRAAAATGTIFTFRSARLNSQRLVFNRPFLMFIVDNNILFLGKVNRP

SEQ ID NO: 140 - DNA, 2058 bp, Homo sapiens
gcacgaggaagccacagatctcttaagaactttctgtctccaaaccgtggctgctcgataaatcagacagaacagttaatcctcaatttaagcctgatctaacccctagaaacagatatagaacaatggaagtgacaacaagattgacatggaatgatgaaaatcatctgcgcaactgcttggaaatgtttctttgagtcttctctataagtctagtgttcatggaggtagcattgaagatatggttgaaagatgcagccgtcagggatgtactataacaatggcttacattgattacaatatgattgtagcctttatgcttggaaattatattaatttacgtgaaagttctacagagccaaatgattccctatggttttcacttcaaaagaaaaatgacaccactgaaatagaaactttactcttaaatacagcaccaaaaattattgatgagcaactggtgtgtcgtttatcgaaaacggatattttcattatatgtcgagataataaaatttatctagataaaatgataacaagaaacttgaaactaaggttttatggccaccgtcagtatttggaatgtgaagtttttcgagttgaaggaattaaggataacctagacgacataaagaggataattaaagccagagagcacagaaataggcttctagcagacatcagagactataggccctatgcagacttggtttcagaaattcgtattcttttggtgggtccagttgggtctggaaagtccagttttttcaattcagtcaagtctatttttcatggccatgtgactggccaagccgtagtggggtctgataccaccagcataaccgagcggtataggatatattctgttaaagatggaaaaaatggaaaatctctgccatttatgttgtgtgacactatggggctagatggggcagaaggagcaggactgtgcatggatgacattccccacatcttaaaaggttgtatgccagacagatatcagtttaattcccgtaaaccaattacacctgagcattctacttttatcacctctccatctctgaaggacaggattcactgtgtggcttatgtcttagacatcaactctattgacaatctctactctaaaatgttggcaaaagtgaagcaagttcacaaagaagtattaaactgtggtatagcatatgtggccttgcttactaaagtggatgattgcagtgaggttcttcaagacaactttttaaacatgagtagatctatgacttctcaaagccgggtcatgaatgtccataaaatgctaggcattcctatttccaatattttgatggttggaaattatgcttcagatttggaactggaccccatgaaggatattctcatcctctctgcactgaggcagatgctgcgggctgcagatgattttttagaagatttgcctcttgaggaaactggtgcaattgagagagcgttacagccctgcatttgagataagttgccttgattctgacatttggcccagcctgtactggtgtgccgcaatgagagtcaatctctattgacagcctgcttcagattttgcttttgttcgttttgccttctgtccttggaacagtcatatctcaagttcaaaggccaaaacctgagaagcggtgggctaagataggtcctactgcaaaccacccctccatatttccgtaccatttacaattcagtttctgtgacatctttttaaaccactggaggaaaaatgagatattctctaatttattcttctataacactctatatagagctatgtgagtactaatcacattgaataatagttataaaattattgtatagacatctgcttcttaaacagattgtgagttctttgagaaacagcgtggattttacttatctgtgtattcacagagcttagcacagtgcctggtaatgagcaagcatacttgccattacttttccttcccactctctccaacatcacattcactttaaatttttctgtatatagaaaggaaaactagcctgggcaacatgatgaaaccccatctccactgc

SEQ ID NO: 141 - protein, 413 aa, Homo sapiens
MVERCSRQGCTITMAYIDYNMIVAFMLGNYINLRESSTEPNDSLWFSLQKKNDTTEIETLLLNTAPKIIDEQLVCRLSKTDIFIICRDNKIYLDKMITRNLKLRFYGHRQYLECEVFRVEGIKDNLDDIKRIIKAREHRNRLLADIRDYRPYADLVSEIRILLVGPVGSGKSSFFNSVKSIFHGHVTGQAVVGSDTTSITERYRIYSVKDGKNGKSLPFMLCDTMGLDGAEGAGLCMDDIPHILKGCMPDRYQFNSRKPITPEHSTFITSPSLKDRIHCVAYVLDINSIDNLYSKMLAKVKQVHKEVLNCGIAYVALLTKVDDCSEVLQDNFLNMSRSMTSQSRVMNVHKMLGIPISNILMVGNYASDLELDPMKDILILSALRQMLRAADDFLEDLPLEETGAIERALQPCI

SEQ ID NO: 142 - DNA, 1032 bp, Homo sapiens
ggagggtgggcagcactcgctttattgtccagcattccacatggatagtcgccacacctttgcccctgctgcgatgaccctgtcgccacttctgctgttcctgccaccgctgctgctgctgctggacgtccccacggcggcggtgcaggcgtcccctctgcaagcgttagacttctttgggaatgggccaccagttaactacaagacaggcaatctatacctgcgggggcccctgaagaagtccaatgcaccgcttgtcaatgtgaccctctactatgaagcactgtgcggtggctgccgagccttcctgatccgggagctcttcccaacatggctgttggtcatggagatcctcaatgtcacgtcggtgccctacggaaacgcacaggaacaaaatgtcagtggcaggtgggagttcaagtgccagcttggagaagaggagtgcaaattcaacaaggtggaggcctgcgtgttggatgaacttgacatggagctagccttcctgaccatgtctggcatggcatggaagagtttgaggacatggagagaagtctgccactatgcctgcagctctacgccccagggctgtcgccagaactatcatggagtgtgcaatgggggaccgcggcatgcagctcatgcacgccaacgcccagcggacagatgctctccagccaccgcacgagtatgtgccctgggtcaccgtcaatgggaaacccttggaagatcagacccagctccttacccttgtctgccagttgtaccagggcaagaagccggatgtctgcccttcctcaaccagctccctccggagtgtttgcttcgagtgttggccggtgggctgcggagagctcatggaaggcgagtgggaactcggctgcctgcctttttttctgatccagaccctcggcacctgctacttaccaactggaaaattttatgcatcccatgaagcccagatacacaaaattccacccctagatcaagaatcctgctccactaagaatggtgctaaagtaaaactagtttaat

SEQ ID NO: 143 - protein, 303 aa, Homo sapiens
MDSRHTFAPAAMTLSPLLLFLPPLLLLLDVPTAAVQASPLQALDFFGNGPPVNYKTGNLYLRGPLKKSNAPLVNVTLYYEALCGGCRAFLIRELFPTWLLVMEILNVTSVPYGNAQEQNVSGRWEFKCQLGEEECKFNKVEACVLDELDMELAFLTMSGMAWKSLRTWREVCHYACSSTPQGCRQNYHGVCNGGPRHAAHARQRPADRCSPATARVCALGHRQWETLGRSDPAPYPCLPVVPGQEAGCLPFLNQLPPECLLRVLAGGLRRAHGRRVGTRLPAFFSDPDPRHLLLTNWKILCIP

SEQ ID NO: 144 - DNA, 1356 bp, Homo sapiens
ttctcccgcaaccttcccttcgctccctcccgtcccccccagctcctagcctccgactccctccccccctcacgcccgccctctcgccttcgccgaaccaaagtggattaattacacgctttctgtttctctccgtgctgttctctcccgctgtgcgcctgcccgcctctcgctgtcctctctccccctcgccctctcttcggcccccccctttcacgttcactctgtctctcccactatctctgcccccctctatccttgatacaacagctgacctcatttcccgataccttttcccccccgaaaagtacaacatctggcccgccccagcccgaagacagcccgtcctccctggacaatcagacgaattctccccccccccccaaaaaaaaaagccatccccccgctctgccccgtcgcacattcggcccccgcgactcggccagagcggcgctggcagaggagtgtccggcaggagggccaacgcccgctgttcggtttgcgacacgcagcagggaggtgggcggcagcgtcgccggcttccagacaccaatgggaatcccaatggggaagtcgatgctggtgcttctcaccttcttggccttcgcctcgtgctgcattgctgcttaccgccccagtgagaccctgtgcggcggggagctggtggacaccctccagttcgtctgtggggaccgcggcttctacttcagcaggcccgcaagccgtgtgagccgtcgcagccgtggcatcgttgaggagtgctgtttccgcagctgtgacctggccctcctggagacgtactgtgctacccccgccaagtccgagagggacgtgtcgacccctccgaccgtgcttccggacaacttccccagataccccgtgggcaagttcttccaatatgacacctggaagcagtccacccagcgcctgcgcaggggcctgcctgccctcctgcgtgcccgccggggtcacgtgctcgccaaggagctcgaggcgttcagggaggccaaacgtcaccgtcccctgattgctctacccacccaagaccccgcccacgggggcgcccccccagagatggccagcaatcggaagtgagcaaaactgccgcaagtctgcagcccggcgccaccatcctgcagcctcctcctgaccacggacgtttccatcaggttccatcccgaaaatctctcggttccacgtccccctggggcttctcctgacccagtccccgtgccccgcctccccgaaacaggctactctcctcggccccctccatcgggctgaggaagcacagcagcatcttcaaacatgtacaaaatcgattggctttaaacacccttcacataccctcccccc

SEQ ID NO: 145 - protein, 180 aa, Homo sapiens
MGIPMGKSMLVLLTFLAFASCCIAAYRPSETLCGGELVDTLQFVCGDRGFYFSRPASRVSRRSRGIVEECCFRSCDLALLETYCATPAKSERDVSTPPTVLPDNFPRYPVGKFFQYDTWKQSTQRLRRGLPALLRARRGHVLAKELEAFREAKRHRPLIALPTQDPAHGGAPPEMASNRK

SEQ ID NO: 146 - DNA, 3667 bp, Homo sapiens
tatatcatgtaagctagtcacacctatttgaattcacttttctttgtttcttgatttcttatggctattattgcaacaatcaaacaaattttgaataccttttgtgagctagcactgtggaaatatgagggaagtttattgtgttcttactttaaatagtttgcagttttattgtgtatacaaatgtatgcatgtgaaatatacagattttaaaaaagcagatcattaaagattaggtcataaggtgtagtctgtacatggaggaagagctaagttgattcagaataacatggttagatttcgaagctagcctggatttgaatcttggatccaccactgactagctatgtaagcttagtcaagcaactcaacggaggaggcgaggagcgccgggtaccgggccgggggagccgcgggctctcggggaagagacggatgatgaacaagctttacatcgggaacctgagccccgccgtcaccgccgacgacctccggcagctctttggggacaggaagctgcccctggcgggacaggtcctgctgaagtccggctacgccttcgtggactaccccgaccagaactgggccatccgcgccatcgagaccctctcgggtaaagtggaattgcatgggaaaatcatggaagttgattactcagtctctaaaaagctaaggagcaggaaaattcagattcgaaacatccctcctcacctgcagtgggaggtgttggatggacttttggctcaatatgggacagtggagaatgtggaacaagtcaacacagacacagaaaccgccgttgtcaacgtcacatatgcaacaagagaagaagcaaaaatagccatggagaagctaagcgggcatcagtttgagaactactccttcaagatttcctacatcccggatgaagaggtgagctccccttcgccccctcagcgagcccagcgtggggaccactcttcccgggagcaaggccacgcccctgggggcacttctcaggccagacagattgatttcccgctgcggatcctggtccccacccagtttgttggtgccatcatcggaaaggagggcttgaccataaagaacatcactaagcagacccagtcccgggtagatatccatagaaaagagaactctggagctgcagagaagcctgtcaccatccatgccaccccagaggggacttctgaagcatgccgcatgattcttgaaatcatgcagaaagaggcagatgagaccaaactagccgaagagattcctctgaaaatcttggcacacaatggcttggttggaagactgattggaaaagaaggcagaaatttgaagaaaattgaacatgaaacagggaccaagataacaatctcatctttgcaggatttgagcatatacaacccggaaagaaccatcactgtgaagggcacagttgaggcctgtgccagtgctgagatagagattatgaagaagctgcgtgaggcctttgaaaatgatatgctggctgttaacacccactccggatacttctccagcctgtacccccatcaccagtttggcccgttcccgcatcatcactcttatccagagcaggagattgtgaatctcttcatcccaacccaggctgtgggcgccatcatcgggaagaagggggcacacatcaaacagctggcgagattcgccggagcctctatcaagattgcccctgcggaaggcccagacgtcagcgaaaggatggtcatcatcaccgggccaccggaagcccagttcaaggcccagggacggatctttgggaaactgaaagaggaaaacttctttaaccccaaagaagaagtgaagctggaagcgcatatcagagtgccctcttccacagctggccgggtgattggcaaaggtggcaagaccgtgaacgaactgcagaacttaaccagtgcagaagtcatcgtgcctcgtgaccaaacgccagatgaaaatgaggaagtgatcgtcagaattatcgggcacttctttgctagccagactgcacagcgcaagatcagggaaattgtacaacaggtgaagcagcaggagcagaaataccctcagggagtcgcctcacagcgcagcaagtgaggctcccacaggcaccagcaaaacaacggatgaatgtagcccttccaacacctgacagaatgagaccaaacgcagccagccagatcgggagcaaaccaaagaccatctgaggaatgagaagtctgcggaggcggccagggactctgccgaggccctgagaaccccaggggccgaggaggggcggggaaggtcagccaggtttgccagaaccaccgagccccgcctcccgccccccagggcttctgcaggcttcagccatccacttcaccatccactcggatctctcctgaactcccacgacgctatcccttttagttgaactaacataggtgaacgtgttcaaagccaagcaaaatgcacaccctttttctgtggcaaatcgtctctgtacatgtgtgtacatattagaaagggaagatgttaagatatgtggcctgtgggttacacagggtgcctgcagcggtaatatattttagaaataatatatcaaataactcaactaactccaatttttaatcaattattaatttttttttctttttaaagagaaagcaggcttttctagactttaaagaataaagtctttgggaggtctcacggtgtagagaggagctttgaggccacccgcacaaaattcacccagagggaaatctcgtcggaaggacactcacggcagttctggatcacctgtgtatgtcaacagaagggataccgtctccttgaagaggaaactctgtcactcctcatgcctgtctagctcatacacccatttctctttgcttcacaggttttaaactggttttttgcatactgctatataattctctgtctctctctgtttatctctcccctccctcccctccccttcttctccatctccattcttttgaatttcctcatccctccatctcaatcccgtatctacgcaccccccccccccaggcaaagcagtgctctgagtatcacatcacacaaaaggaacaaaagcgaaacacacaaaccagcctcaacttacacttggttactcaaaagaacaagagtcaatggtacttgtcctagcgttttggaagaggaaaacaggaacccaccaaaccaaccaatcaaccaaacaaagaaaaaattccacaatgaaagaatgtattttgtctttttgcattttggtgtataagccatcaatattcagcaaaatgattcctttctttaaaaaaaaaaaatgtggaggaaagtagaaatttaccaaggttgttggcccagggcgttaaattcacagatttttttaacgagaaaaacacacagaagaagctacctcaggtgtttttacctcagcaccttgatcttgtgtttcccttagagattttgtaaagctgatagttggagcatttttttatttttttaataaaaatgagttggaaaaaaaataagatatcaactgccagcctggagaaggtgacagtccaagtgtgcaacagctgttctgaattgtcttccgctagccaagaacctatatggccttcttttggacaaaccttgaaaatgtttatttaaaaaaaaaaaaaaaaaa

SEQ ID NO: 147 - protein, 556 aa, Homo sapiens
MMNKLYIGNLSPAVTADDLRQLFGDRKLPLAGQVLLKSGYAFVDYPDQNWAIRAIETLSGKVELHGKIMEVDYSVSKKLRSRKIQIRNIPPHLQWEVLDGLLAQYGTVENVEQVNTDTETAVVNVTYATREEAKIAMEKLSGHQFENYSFKISYIPDEEVSSPSPPQRAQRGDHSSREQGHAPGGTSQARQIDFPLRILVPTQFVGAIIGKEGLTIKNITKQTQSRVDIHRKENSGAAEKPVTIHATPEGTSEACRMILEIMQKEADETKLAEEIPLKILAHNGLVGRLIGKEGRNLKKIEHETGTKITISSLQDLSIYNPERTITVKGTVEACASAEIEIMKKLREAFENDMLAVNTHSGYFSSLYPHHQFGPFPHHHSYPEQEIVNLFIPTQAVGAIIGKKGAHIKQLARFAGASIKIAPAEGPDVSERMVIITGPPEAQFKAQGRIFGKLKEENFFNPKEEVKLEAHIRVPSSTAGRVIGKGGKTVNELQNLTSAEVIVPRDQTPDENEEVIVRIIGHFFASQTAQRKIREIVQQVKQQEQKYPQGVASQRSK

SEQ ID NO: 148 - DNA, 1475 bp, Homo sapiens
cccagaggagcagactacaagaatggcacacgctatggaaaactcctggacaatcagtaaagagtaccatattgatgaagaagtgggctttgctctgccaaatccacaggaaaatctacctgatttttataatgactggatgttcattgctaaacatctgcctgatctcatagagtctggccagcttcgagaaagagttgagaagttaaacatgctcagcattgatcatctcacagaccacaagtcacagcgccttgcacgtctagttctgggatgcatcaccatggcatatgtgtggggcaaaggtcatggagatgtccgtaaggtcttgccaagaaatattgctgttccttactgccaactctccaagaaactggaactgcctcctattttggtttatgcagactgtgtcttggcaaactggaagaaaaaggatcctaataagcccctgacttatgagaacatggacgttttgttctcatttcgtgatggagactgcagtaaaggattcttcctggtctctctattggtggaaatagcagctgcttctgcaatcaaagtaattcctactgtattcaaggcaatgcaaatgcaagaacgggacactttgctaaaggcgctgttggaaatagcttcttgcttggagaaagcccttcaagtgtttcaccaaatccacgatcatgtgaacccaaaagcatttttcagtgttcttcgcatatatttgtctggctggaaaggcaacccccagctatcagacggtctggtgtatgaagggttctgggaagacccaaaggagtttgcagggggcagtgcaggccaaagcagcgtctttcagtgctttgacgtcctgctgggcatccagcagactgctggtggaggacatgctgctcagttcctccaggacatgagaagatatatgccaccagctcacaggaacttcctgtgctcattagagtcaaatccctcagtccgtgagtttgtcctttcaaaaggtgatgctggcctgcgggaagcttatgacgcctgtgtgaaagctctggtctccctgaggagctaccatctgcaaatcgtgactaagtacatcctgattcctgcaagccagcagccaaaggagaataagacctctgaagacccttcaaaactggaagccaaaggaactggaggcactgatttaatgaatttcctgaagactgtaagaagtacaactgagaaatcccttttgaaggaaggttaatgtaacccaacaagagcacattttatcatagcagagacatctgtatgcattcctgtcattacccattgtaacagagccacaaactaatactatgcaatgttttaccaataatgcaatacaaaagacctcaaaatacctgtgcatttcttgtaggaaaacaacaaaaggtaattatgtgtaattatactagaagttttgtaatctgtatcttatcattggaataaaatgacattcaataaat

SEQ ID NO: 149 - protein, 403 aa, Homo sapiens [sequence omitted]

SEQ ID NO: 150 - DNA, 2129 bp, Homo sapiens
cagactgccataagatggcgtccgtggcggctgcacgagcagttcctgtgggcagtgggctcaggggcctgcaacggaccctacctcttgtagtgattctcggggccacgggcacssgmraatccacgctggcgttgcagctaggccagcggctcggcggtgagatcgtcagcgctgactccatgcaggtctatgaaggcctagacatcatcaccaacaaggtttctgcccaagagcagagaatctgccggcaccacatgatcagctttgtggatcctcttgtgaccaattacacagtggtggacttcagaaatagagcaactgctctgattgaagatatatttgcccgagacaaaattcctattgttgtgggaggaaccaattattacattgaatctctgctctggaaagttcttgtcaataccaagccccaggagatgggcactgagaaagtgattgaccgaaaagtggagcttgaaaaggaggatggtcttgtacttcacaaacgcctaagccaggtggacccagaaatggctgccaagctgcatccacatgacaaacgcaaagtggccaggagcttgcaagtttttgaagaaacaggaatctctcatagtgaatttctccatcgtcaacatacggaagaaggtggtggtccccttggaggtcctctgaagttctctaacccttgcatcctttggcttcatgctgaccaggcagttctagatgagcgcttggataagagggtggatgacatgcttgctgctgggctcttggaggaactaagagattttcacagacgctataatcagaagaatgtttcggaaaatagccaggactatcaacatggtatcttccaatcaattggcttcaaggaatttcacgagtacctgatcactgagggaaaatgcacactggagactagtaaccagcttctaaagaaaggtattgaggctctgaaacaagtaactaagagatatgcccggaaacaaaaccgatgggttaaaaaccgttttttgagcagacctggtcccattgtcccccctgtctayggcttagaggtatctgatgtctcgaagtgggaagagtctgttcttgaacctgctcttgaaatcgtgcaaagtttcatccagggccacaagcctacagccactccaataaagatgccatacaatgaagctgagaacaagagaagttatcacctgtgtgacctctgtgatcgaatcatcattggggatcgcgaatgggcagcgcacataaaatccaaatcccacttgaaccaactgaagaaaagaagaagattggactcagatgctgtcaacaccatagaaagtcagagtgtttccccagaccataacaaagaacctaaagagaagggatccccagggcagaatgatcaagagctgaaatgcagcgtttaagagacatgtccagtggcctttggaaaggtggtggggatccagttcaggagggaggggtatgtttgtctcccagtctgggcaaaggagtgctatgcggaattctctgcatagcagaaaagctcccaccattttcttttgatgtggttttaaagtctcacgttctctataatagaaacagcaggtcttgtcagctccttgtgtggctgatgtgtctggaaatgatgtagttcaggaaagcattttttttttctttgaaccttaaaggttctattattaaaagcagcacagattccacatttttatacatgaggatcttctttgtggtgaataccaggattgactgcatccctttaaagaagttttatgtccctgactctggctaaaattatctaatttccagatgcttttgtagatgactgaagtatttgtgagccacatattgggagttctagatttgagtgaatggcaggaaagggccatctccattgagatgattaagtgaaccaaactagttctcggaattctacagagaaggagggaatcagactgaagaagctgtgacataggacttgaagaccaaagactttgaaatttgcgagctgctcatgtgtgagttattatcactgctgtctttctattgagttacaaatctatatttttattgaagtttaaataaagaaaaaatttaaaaaaaaaaaaaaaaaaaaaaaa

SEQ ID NO: 151 - protein, 465 aa, Homo sapiens
MASVAAARAVPVGSGLRGLQRTLPLVVILGATGTSTLALQLGQRLGGEIVSADSMQVYEGLDIITNKVSAQEQRICRHHMISFVDPLVTNYTVVDFRNRATALIEDIFARDKIPIVVGGTNYYIESLLWKVLVNTKPQEMGTEKVIDRKVELEKEDGLVLHKRLSQVDPEMAAKLHPHDKRKVARSLQVFEETGISHSEFLHRQHTEEGGGPLGGPLKFSNPCILWLHADQAVLDERLDKRVDDMLAAGLLEELRDFHRRYNQKNVSENSQDYQHGIFQSIGFKEFHEYLITEGKCTLETSNQLLKKGIEALKQVTKRYARKQNRWVKNRFLSRPGPIVPPVYGLEVSDVSKWEESVLEPALEIVQSFIQGHKPTATPIKMPYNEAENKRSYHLCDLCDRIIIGDREWAAHIKSKSHLNQLKKRRRLDSDAVNTIESQSVSPDHNKEPKEKGSPGQNDQELKCSV

SEQ ID NO: 152 - DNA, 2129 bp, Homo sapiens
cagactgccataagatggcgtccgtggcggctgcacgagcagttcctgtgggcagtgggctcaggggcctgcaacggaccctacctcttgtagtgattctcggggccacgggcaccggcaaatccacgctggcgttgcagctaggccagcggctcggcggtgagatcgtcagcgctgactccatgcaggtctatgaaggcctagacatcatcaccaacaaggtttctgcccaagagcagagaatctgccggcaccacatgatcagctttgtggatcctcttgtgaccaattacacagtggtggacttcagaaatagagcaactgctctgattgaagatatatttgcccgagacaaaattcctattgttgtgggaggaaccaattattacattgaatctctgctctggaaagttcttgtcaataccaagccccaggagatgggcactgagaaagtgattgaccgaaaagtggagcttgaaaaggaggatggtcttgtacttcacaaacgcctaagccaggtggacccagaaatggctgccaagctgcatccacatgacaaacgcaaagtggccaggagcttgcaagtttttgaagaaacaggaatctctcatagtgaatttctccatcgtcaacatacggaagaaggtggtggtccccttggaggtcctctgaagttctctaacccttgcatcctttggcttcatgctgaccaggcagttctagatgagcgcttggataagagggtggatgacatgcttgctgctgggctcttggaggaactaagagattttcacagacgctataatcagaagaatgtttcggaaaatagccaggactatcaacatggtatcttccaatcaattggcttcaaggaatttcacgagtacctgatcactgagggaaaatgcacactggagactagtaaccagcttctaaagaaaggtattgaggctctgaaacaagtaactaagagatatgcccggaaacaaaaccgatgggttaaaaaccgttttttgagcagacctggtcccattgtcccccctgtctayggcttagaggtatctgatgtctcgaagtgggaagagtctgttcttgaacctgctcttgaaatcgtgcaaagtttcatccagggccacaagcctacagccactccaataaagatgccatacaatgaagctgagaacaagagaagttatcacctgtgtgacctctgtgatcgaatcatcattggggatcgcgaatgggcagcgcacataaaatccaaatcccacttgaaccaactgaagaaaagaagaagattggactcagatgctgtcaacaccatagaaagtcagagtgtttccccagaccataacaaagaacctaaagagaagggatccccagggcagaatgatcaagagctgaaatgcagcgtttaagagacatgtccagtggcctttggaaaggtggtggggatccagttcaggagggaggggtatgtttgtctcccagtctgggcaaaggagtgctatgcggaattctctgcatagcagaaaagctcccaccattttcttttgatgtggttttaaagtctcacgttctctataatagaaacagcaggtcttgtcagctccttgtgtggctgatgtgtctggaaatgatgtagttcaggaaagcattttttttttctttgaaccttaaaggttctattattaaaagcagcacagattccacatttttatacatgaggatcttctttgtggtgaataccaggattgactgcatccctttaaagaagttttatgtccctgactctggctaaaattatctaatttccagatgcttttgtagatgactgaagtatttgtgagccacatattgggagttctagatttgagtgaatggcaggaaagggccatctccattgagatgattaagtgaaccaaactagttctcggaattctacagagaaggagggaatcagactgaagaagctgtgacataggacttgaagaccaaagactttgaaatttgcgagctgctcatgtgtgagttattatcactgctgtctttctattgagttacaaatctatatttttattgaagtttaaataaagaaaaaatttaaaaaaaaaaaaaaaaaaaaaaaa

SEQ ID NO: 153 - protein, 467 aa, Homo sapiens
MASVAAARAVPVGSGLRGLQRTLPLVVILGATGTGKSTLALQLGQRLGGEIVSADSMQVYEGLDIITNKVSAQEQRICRHHMISFVDPLVTNYTVVDFRNRATALIEDIFARDKIPIVVGGTNYYIESLLWKVLVNTKPQEMGTEKVIDRKVELEKEDGLVLHKRLSQVDPEMAAKLHPHDKRKVARSLQVFEETGISHSEFLHRQHTEEGGGPLGGPLKFSNPCILWLHADQAVLDERLDKRVDDMLAAGLLEELRDFHRRYNQKNVSENSQDYQHGIFQSIGFKEFHEYLITEGKCTLETSNQLLKKGIEALKQVTKRYARKQNRWVKNRFLSRPGPIVPPVYGLEVSDVSKWEESVLEPALEIVQSFIQGHKPTATPIKMPYNEAENKRSYHLCDLCDRIIIGDREWAAHIKSKSHLNQLKKRRRLDSDAVNTIESQSVSPDHNKEPKEKGSPGQNDQELKCSV

SEQ ID NO: 154 - DNA, 4495 bp, Homo sapiens
aggtgaacaggtcctcacgcccagctccgccccctcacgcgctctcgccgggaccccgcttccgctggcagccatgggccccggccccagccgcgcgccccgcgccccacgcctgatgctctgtgcgctcgccttgatggtggcggccggcggctgcgtcgtctccgccttcaacctggatacccgattcctggtagtgaaggaggccgggaacccgggcagcctcttcggctactcggtcgccctccatcggcagacagagcggcagcagcgctacctgctcctggctggtgccccccgggagctcgctgtgcccgatggctacaccaaccggactggtgctgtgtacctgtgcccactcactgcccacaaggatgactgtgagcggatgaacatcacagtgaaaaatgaccctggccatcacattattgaggacatgtggcttggagtgactgtggccagccagggccctgcaggcagagttctggtctgtgcccaccgctacacccaggtgctgtggtcagggtcagaagaccagcggcgcatggtgggcaagtgctacgtgcgaggcaatgacctagagctggactccagtgatgactggcagacctaccacaacgagatgtgcaatagcaacacagactacctggagacgggcatgtgccagctgggcaccagcggtggcttcacccagaacactgtgtacttcggcgcccccggtgcctacaactggaaaggaaacagctacatgattcagcgcaaggagtgggacttatctgagtatagttacaaggacccagaggaccaaggaaacctctatattgggtacacgatgcaggtaggcagcttcatcctgcaccccaaaaacatcaccattgtgacaggtgccccacggcaccgacatatgggcgcggtgttcttgctgagccaggaggcaggcggagacctgcggaggaggcaggtgctggagggctcgcaggtgggcgcctattttggcagcgcaattgccctggcagacctgaacaatgatgggtggcaggacctcctggtgggcgccccctactacttcgagaggaaagaggaagtagggggtgccatctatgtcttcatgaaccaggcgggaacctccttccctgctcacccctcactccttcttcatggccccagtggctctgcctttggtttatctgtggccagcattggtgacatcaaccaggatggatttcaggatattgctgtgggagctccgtttgaaggcttgggcaaagtgtacatctatcacagtagctctaaggggctccttagacagccccagcaggtaatccatggagagaagctgggactgcctgggttggccaccttcggctattccctcagtgggcagatggatgtggatgagaacttctacccagaccttctagtgggaagcctgtcagaccacattgtgctgctgcgggcccggccagtcatcaacatcgtccacaagaccttggtgcccaggccagctgtgctggaccctgcactttgcacggccacctcttgtgtgcaagtggagctgtgctttgcttacaaccagagtgccgggaaccccaactacaggcgaaacatcaccctggcctacactctggaggctgacagggaccgccggccgccccggctccgctttgccggcagtgagtccgctgtcttccacggcttcttctccatgcccgagatgcgctgccagaagctggagctgctcctgatggacaacctccgtgacaaactccgccccatcatcatctccatgaactactctttacctttgcggatgcccgatcgcccccggctggggctgcggtccctggacgcctacccgatcctcaaccaggcacaggctctggagaaccacactgaggtccagttccagaaggagtgcgggcctgacaacaagtgtgagagcaacttgcagatgcgggcagccttcgtgtcagagcagcagcagaagctgagcaggctccagtacagcagagacgtccggaaattgctcctgagcatcaacgtgacgaacacccggacctcggagcgctccggggaggacgcccacgaggcgctgctcaccctggtggtgcctcccgccctgctgctgtcctcagtgcgcccccccggggcctgccaagctaatgagaccatcttttgcgagctggggaaccccttcaaacggaaccagaggatggagctgctcatcgcctttgaggtcatcggggtgaccctgcacacaagggaccttcaggtgcagctgcagctctccacgtcgagtcaccaggacaacctgtggcccatgatcctcactctgctggtggactatacactccagacctcgcttagcatggtaaatcaccggctacaaagcttctttggggggacagtgatgggtgagtctggcatgaaaactgtggaggatgtaggaagccccctcaagtatgaattccaggtgggcccaatgggggaggggctggtgggcctggggaccctggtcctaggtctggagtggccctacgaagtcagcaatggcaagtggctgctgtatcccacggagatcaccgtccatggcaatgggtcctggccctgccgaccacctggagaccttatcaaccctctcaacctcactctttctgaccctggggacaggccatcatccccacagcgcaggcgccgacagctggatccagggggaggccagggccccccacctgtcactctggctgctgccaaaaaagccaagtctgagactgtgctgacctgtgccacagggcgtgcccactgtgtgtggctagagtgccccatccctgatgcccccgttgtcaccaacgtgactgtgaaggcacgagtgtggaacagcaccttcatcgaggattacagagactttgaccgagtccgggtaaatggctgggctaccctattcctccgaaccagcatccccaccatcaacatggagaacaagaccacgtggttctctgtggacattgactcggagctggtggaggagctgccggccgaaatcgagctgtggctggtgctggtggccgtgggtgcagggctgctgctgctggggctgatcatcctcctgctgtggaagtgtgacttctttaagcggacccgctattatcagatcatgcccaagtaccacgcagtgcggatccgggaggaggagcgctacccacctccagggagcaccctgcccaccaagaagcactgggtgaccagctggcagactcgggaccaatactactgacgtcctccctgatcccaccccctcctcccccagtgtcccctttcttcctatttatcataagttatgcctctgacagtccacaggggccaccacctttggctggtagcagcaggctcaggcacatacacctcgtcaagagcatgcacatgctgtctggccctggggatcttcccacaggagggccagcgctgtggaccttacaacgccgagtgcactgcattcctgtgccctagatgcacgtggggcccactgctcgtggactgtgctggtgcatcacggatggtgcatgggctcgccgtgtctcagcctctgccagcgccagcgccaaaacaagccaaagagcctcccaccagagccgggaggaaaaggcccctgcaatgtggtgacacctcccctttcacacctggatccatcttgagagccacagtcactggattgactttgctgtcaaaactactgacagggagcagcccccgggccgctggctggtgggcccccaattgacacccatgccagagaggtggggatcctgcctaaggttgtctacgggggcacttggaggacctggcgtgctcagacccaacagcaaaggaactagaaagaaggacccagaaggcttgctttcctgcatctctgtgaagcctctctccttggccacagactgaactcgcagggagtgcagcaggaaggaacaaagacaggcaaacggcaacgtagcctgggctcactgtgctggggcatggcgggatcctccacagagaggaggggaccaattctggacagacagatgttgggaggatacagaggagatgccacttctcactcaccactaccagccagcctccagaaggccccagagagaccctgcaagaccacggagggagccgacacttgaatgtagtaataggcagggggccctgccaccccatccagccagaccccagctgaaccatgcgtcaggggcctagaggtggagttcttagctatccttggctttctgtgccagcctggctctgcccctcccccatgggctgtgtcctaaggcccatttgagaagctgaggctagttccaaaaacctctcctgacccctgcctgttggcagcccactccccagccccagccccttccatggtactgtagcaggggaattccctccccctccttgtgccttctttgtatataggcttctcaccgcgaccaataaacagctcccagtttgt

SEQ ID NO: 155 - protein, 1066 aa, Homo sapiens
MGPGPSRAPRAPRLMLCALALMVAAGGCVVSAFNLDTRFLVVKEAGNPGSLFGYSVALHRQTERQQRYLLLAGAPRELAVPDGYTNRTGAVYLCPLTAHKDDCERMNITVKNDPGHHIIEDMWLGVTVASQGPAGRVLVCAHRYTQVLWSGSEDQRRMVGKCYVRGNDLELDSSDDWQTYHNEMCNSNTDYLETGMCQLGTSGGFTQNTVYFGAPGAYNWKGNSYMIQRKEWDLSEYSYKDPEDQGNLYIGYTMQVGSFILHPKNITIVTGAPRHRHMGAVFLLSQEAGGDLRRRQVLEGSQVGAYFGSAIALADLNNDGWQDLLVGAPYYFERKEEVGGAIYVFMNQAGTSFPAHPSLLLHGPSGSAFGLSVASIGDINQDGFQDIAVGAPFEGLGKVYIYHSSSKGLLRQPQQVIHGEKLGLPGLATFGYSLSGQMDVDENFYPDLLVGSLSDHIVLLRARPVINIVHKTLVPRPAVLDPALCTATSCVQVELCFAYNQSAGNPNYRRNITLAYTLEADRDRRPPRLRFAGSESAVFHGFFSMPEMRCQKLELLLMDNLRDKLRPIIISMNYSLPLRMPDRPRLGLRSLDAYPILNQAQALENHTEVQFQKECGPDNKCESNLQMRAAFVSEQQQKLSRLQYSRDVRKLLLSINVTNTRTSERSGEDAHEALLTLVVPPALLLSSVRPPGACQANETIFCELGNPFKRNQRMELLIAFEVIGVTLHTRDLQVQLQLSTSSHQDNLWPMILTLLVDYTLQTSLSMVNHRLQSFFGGTVMGESGMKTVEDVGSPLKYEFQVGPMGEGLVGLGTLVLGLEWPYEVSNGKWLLYPTEITVHGNGSWPCRPPGDLINPLNLTLSDPGDRPSSPQRRRRQLDPGGGQGPPPVTLAAAKKAKSETVLTCATGRAHCVWLECPIPDAPVVTNVTVKARVWNSTFIEDYRDFDRVRVNGWATLFLRTSIPTINMENKTTWFSVDIDSELVEELPAEIELWLVLVAVGAGLLLLGLIILLLWKCDFFKRTRYYQIMPKYHAVRIREEERYPPPGSTLPTKKHWVTSWQTRDQYY

SEQ ID NO: 156 - DNA, 8747 bp, Homo sapiens
cccagagccgcctccccctgttgctggcatcccgagcttcctcccttgccagccaggacgctgccgacttgtctttgcccgctgctccgcagacggggctgcaaagctgcaactaatggtgttggcctccctgcccacctgtggaagcaactgcgctgattgatgcgccacagacttttttcccctcgacctcgccggcgtaccctcccacagatccagcatcacccagtgaatgtacattagggtggtttcccccccagcttcgggctttgtttgggtttgattgtgtttggctcttcgctaagctgatttatgcagcagaagccccaccggctggagagaaacaaaagctcttttctttgtcccggagcaggctgcggagcccttgcagagccctctctccagtcgccgccgggcccttggccgtcgaaggaggtgcttctcgcggagaccgcgggacccgccgtgccgagccgggagggccgtaggggccctgagatgccgagcggtgcccgggcccgcttacctgcaccgcttgctccgagccgcggggtccgcctgctaggcctgcggaaaacgtcctagcgacactcgcccgcgggccccgaggtcgcccgggaggccgagcccgcgtccggaaggcagccaggcggcgggcgcggggcgggctgttttgcattatgtgcggctcggccctggctttttttaccgctgcatttgtctgcctgcaaaacgaccggcgaggtcccgcctcgttcctctgggcagcctgggtgttttcacttgttcttggactgggccaaggtgaagacaatagatgtgcatcttcaaatgcagcatcctgtgccaggtgccttgcgctgggtccagaatgtggatggtgtgttcaagaggatttcatttcaggtggatcaagaagtgaacgttgtgatattgtttccaatttaataagcaaaggctgctcagttgattcaatagaatacccatctgtgcatgttataatacccactgaaaatgaaattaatacccaggtgacaccaggagaagtgtctatccagctgcgtccaggagccgaagctaattttatgctgaaagttcatcctctgaagaaatatcctgtggatctttattatcttgttgatgtctcagcatcaatgcacaataatatagaaaaattaaattccgttggaaacgatttatctagaaaaatggcatttttctcccgtgactttcgtcttggatttggctcatacgttgataaaacagtttcaccatacattagcatccaccccgaaaggattcataatcaatgcagtgactacaatttagactgcatgcctccccatggatacatccatgtgctgtctttgacagagaacatcactgagtttgagaaagcagttcatagacagaagatctctggaaacatagatacaccagaaggaggttttgacgccatgcttcaggcagctgtctgtgaaagtcatatcggatggcgaaaagaggctaaaagattgctgctggtgatgacagatcagacgtctcatctcgctcttgatagcaaattggcaggcatagtggtgcccaatgacggaaactgtcatctgaaaaacaacgtctacgtcaaatcgacaaccatggaacacccctcactaggccaactttcagagaaattaatagacaacaacattaatgtcatctttgcagttcaaggaaaacaatttcattggtataaggatcttctacccctcttgccaggcaccattgctggtgaaatagaatcaaaggctgcaaacctcaataatttggtagtggaagcctatcagaagctcatttcagaagtgaaagttcaggtggaaaaccaggtacaaggcatctattttaacattaccgccatctgtccagatgggtccagaaagccaggcatggaaggatgcagaaacgtgacgagcaatgatgaagttcttttcaatgtaacagttacaatgaaaaaatgtgatgtcacaggaggaaaaaactatgcaataatcaaacctattggttttaatgaaaccgctaaaattcatatacacagaaactgcagctgtcagtgtgaggacaacagaggacctaaaggaaagtgtgtagatgaaacttttctagattccaagtgtttccagtgtgatgagaataaatgtcattttgatgaagatcagttttcttctgagagttgcaagtcacacaaggatcagcctgtttgcagtggtcgaggagtttgtgtttgtgggaaatgttcatgtcacaaaattaagcttggaaaagtgtatggaaaatactgtgaaaaggatgacttttcttgtccatatcaccatggaaatctgtgtgctgggcatggagagtgtgaagcaggcagatgccaatgcttcagtggctgggaaggtgatcgatgccagtgcccttcagcagcagcccagcactgtgtcaattcaaagggccaagtgtgcagtggaagaggcacgtgtgtgtgtggaaggtgtgagtgcaccgatcccaggagcatcggccgcttctgtgaacactgccccacctgttatacagcctgcaaggaaaactggaattgtatgcaatgccttcaccctcacaatttgtctcaggctatacttgatcagtgcaaaacctcatgtgctctcatggaacaacagcattatgtcgaccaaacttcagaatgtttctccagcccaagctacttgagaatatttttcatcattttcatagttacattcttgattgggttgcttaaagtcctgatcattagacaggtgatactacaatggaatagtaataaaattaagtcctcatcagattacagagtgtcagcctcaaaaaaggataagttgattctgcaaagtgtttgcacaagagcagtcacctaccgacgtgagaagcctgaagaaataaaaatggatatcagcaaattaaatgctcatgaaactttcaggtgcaacttctaaaaaaagatttttaaacacttaatgggaaactggaattgttaataattgctcctaaagattataattttaaaagtcacaggaggagacaaattgctcacggtcatgccagttgctggttgtacactcgaacgaagactgacaagtatcctcatcatgatgtgactcacatagctgctgactttttcagagaaaaatgtgtcttactactgtttgagactagtgtcgttgtagcactttactgtaatatataacttatttagatcagcatagaatgtagatcctctgaagagcactgattacactttacaggtacctgttatccctacgcttcccagagagaacaatgctgtgagagagtttagcattgtgtcactacaagggtacagtaatccctgcactggacatgtgaggaaaaaaataatctggcaagtatattctaaggttgccaaacacttcaacagttggtggttgaatagacaagaacagctagatgaataaatgattcgtgtttcactctttcaagaggtgaacagatacaaccttaatcttaaaagattattgctttttaaagtgtgtagttttatgcatgtgtgtttatggtttgcttatttttgcaagatggatactaattccagcattctctcctctttgcctttatgttttgttttcttttttacaggataagtttatgtatgtcacagatgactggattaattaagtgctaagttactactgccataaaaaactaataatacaatgtcactttatcagaatactagttttaaaagctgaatgttaataggggacactgtaaagtatcatcaaaacctgaatagcttcattgtgcacaagtgtggagttttgtatcctcttacctggtaaactgaagggattgtttggccatttcatttatcttatcattaattcacaagatagttagaaattctgcctcaagcaaagtaccacattttgaatgttttcttagattttgattgcaagtagatatcagcattttttaaatgaaaagctatattatcttctcccttcaaggcagcctaaggatgttctttcccagaatcactccaacccttcttgccagaattcataaaagtacaaaattggagaatagatgatatcttagaaataagctttttttttttttttttttttttttgagacggagtttcactcttgtcacccaggctggagtgcaatggcgcaattagggttcactgcaacctctgcctcccgggttcaagcagttctcctgcctcagcctcctgagtagctgggattacaggcatccaccaccgtgcccagctaatttttgtatttttagtagagacggggttttgccatgttggacaggttgatctcaaactcctgacctcaggtgatctaccctcctcggcctcccagagtgttgggattacaggcatgagccaccatgccaggctgctaattctcctttttagtgagttagggaactgagcctcagaaaacttaaacgatttctcagaaaacactcaagtgataaagtggccacattggaaaggagtttttatcttctcattgtcaggccagtgttcattgcacaatatcatgctacctcttgaatctttaaaatattcaattggcaaatgtttttcaatgtgatttactcatgtcttaagtgtatgaggaaagttcaaagcaaaatagaaaggaataattcaaactgaattgtccataatcagcttccagtctttcatgctaatcagcttcttaagagactgaagtatggcatacctacaggggaattccttcacaccatagcctgtatgaacagtgttccctggagttctccagtgctcagcttgagaccttgatacacgggccatgagccctgtcttccccaatggaaatttatttacacttaccttatccctatggacttagtctgattttattggctaggagtctaacagtcctgtgtggatatacagttttgcccatgacaacaaaggaatctatccgaaatatctttttttttataataaacttccaagatttgctgtcttccagcacttgagttaaagtactagatactgcattttgatgaagactaaccccatctcatattctaccctaaagagaactgaaaaacctataataagttgttctggagccaataaacacagcagctctgttagatgtcctctacagccaagcamtttcaatgctaacttgaactgcatttccttcctcaaatgagagattgacataattcagtactgtgagtcacttgtataagaaacctttgatcactaaaaataatgtaaaaattgggtttagtagcctaatacacataacgttcttcttaaaaaggaaaatggatggatgcctgacaaccctccaaaagaaaaaagtgtaagatagccattaagatgatgacaatttttgaaatgaacattatgatatttatgaacaataaacaaatttccgtatggaatgaattatccaaaaagagtataacaaaatgaaatccttaaaaatccagagtttatattttttttataccctcacttgtttgcactaactttatagtggaccaaggctgttaccataggaagggacaaacttccttgtaggcaactcagtgttagacgatgattgtggttatgcttgcaaagtcttgtgcttatcttttttgtttttacttaaaaagctaatttttaaagattgtagggcttgtattttacttgaataattgatatcttcctgtgtaatgatttgtgagatgagaattaatatttgactagttagaattaattaaatggtaagggaacacagggtactcttaggttaaataatgtatgcaaatagagtctattttcaactaatatggccacaggagccttttgagattcattgatattaaacacaattaatgaaattttaaattgttaacagaattgagaacttgaacaacacttttagtactgcagcatttttgtgccctaaagtatgtaatgatttataaatgtgccatacatacactacaacataacatttgctttgttatgcattttatttctctggggacaccattgcactgcagtgcacacgtatttataaacatttgttatatttttggaaacttgctaatatttattaagtcatagacttttctggaggacttaaaaattcactaaaaatctgattatgtcttaaatgttcagtttatctttggtttattaaaataaaaaaaaaatctaagattaaacacagtagatatctctggaggcaattttccaaaactcaacattaaaatttgtggatgcatgagatgcaatccttcaaagaatgaatctgaaatatatttttaatatttacttaatatccactgaagatatctttatgcaagacaagagtcagccatcagacactgaaatatattatgatagattatgaagaattttctctgtagaattatattcttcctggaacctggtagagtagattagactcaaaggctttttcttccttttcttactcctgttttttccactcactcttcccaagagatttcctaaagcttcaagcttaataagcctaatagtgaaaaataactgaatttaatggtataatgaagttcttcatttccagacatctttaattgatcttaaagctcatttgagtctttgcccctgaacaaagacagacccattaaaatctaagaattctaaattttcacaactgtttgagcttcttttcattttgaaggatttggaatatatatgttttcataaaagtatcaagtgaaatatagttacatgggagctcaatcatgtgcagattgcattctgttatgttgactcaatatttaatttacaactatccttatttatattgacctcaagaactccattttatgcaatgcagaccactgagatatagctaacattctttcaaataattttccttttcttttataattcctctatagcaaatttttatgtataactgattatacatatccatatttatatttcattgattccaagacatcactttttcaatttaacatctctgaaattgtgacatttcttgcaactgttggcacttcagatgcagtgtttaaaattatgcttgaataaatattacactaatccaactttacctaaacgtttatgcatctaggcaaattttgttttcttataaagatttgagagcccatttatgacaaaatatgaaggcgaaatttaaggacaattgagtcacgcacaactcaacatggagcctaactgattatcagctcagatcccgcatatcttgagtttacaaaagctctttcaggtccccatttatactttacgtgagtgcgaatgatttcagcaaaccctaacttaactaacaagaatgggtaggtatgtctacgtttcattaacaaatttttattatttttattctattatatgagatccttttatattatcatctcacttttaaacaaaattaactggaaaaatattacatggaactgtcatagttaggttttgcagcatcttacatgtcttgtatcaatggcaggagaaaaatatgataaaaacaatcagtgctgtgaaaaacaactttcttctagagtcctcttactttttattcttctttatcatttgtgggtttttcccccttggctctgatcactttaacttcaagcttatgtaacgactgttataaaactgcatatttaaattatttgaattatatgaaataattgttcagctatctgggcagctgttaatgtaaacctgagagtaataacactactcttttatctacctggaatacttttctgcataaaatttatctttgtaagctaactctattaatcaggtttcttctagcctctgcaacctacttcagttagaattgtctaatactgctctattaatcaggtttctagcctctacaacctacttcagttaaaattgtctaatacagcaatatttaaaaaaaaaacactgcaattgtcaaggatggaaaatgtgtgatttgtgtaaacaatttttaccaactttacattttcctacagataaatgtgaaattttgataagaagtctacgcaatgacaagtatggtacataaattttattaagaatattgagtataaagtactttaattctaaattataagaaaatatacatttgcacatattaatatagaaattcattttgtgtatatttaacatagcttttaaactattttacattagctacttcattatggtttcttgaacttctgaaaaaaattagaaatgtattaaacttatcagtaacataaaaacttattttgtttcacctaacgaatactgcgtttgtaaaaataaatttaatatagaatatatttttaaattaaatatttgaatataaaatagctctaagaaagaagcaaattatcactgaacatatttcttattatttctggctttgaattatacgtaacttaaattgtcttaaatgatacagaatattggagaatatgatactttcacataatatactatgaacctgttcatataactctgattgactactaacttctgttttatgtatttattaaagagctgacactgtagtttgtggtgagatgtttatttttctaacagagcttataacagttaggacaaggcatttaattaatgcatcattctgtttagtagtaggtgttaatcaatatgaaattctctgttttaaaataaaaatgtaaaaatctaa

SEQ ID NO: 157 - protein, 769 aa, Homo sapiens
MCGSALAFFTAAFVCLQNDRRGPASFLWAAWVFSLVLGLGQGEDNRCASSNAASCARCLALGPECGWCVQEDFISGGSRSERCDIVSNLISKGCSVDSIEYPSVHVIIPTENEINTQVTPGEVSIQLRPGAEANFMLKVHPLKKYPVDLYYLVDVSASMHNNIEKLNSVGNDLSRKMAFFSRDFRLGFGSYVDKTVSPYISIHPERIHNQCSDYNLDCMPPHGYIHVLSLTENITEFEKAVHRQKISGNIDTPEGGFDAMLQAAVCESHIGWRKEAKRLLLVMTDQTSHLALDSKLAGIVVPNDGNCHLKNNVYVKSTTMEHPSLGQLSEKLIDNNINVIFAVQGKQFHWYKDLLPLLPGTIAGEIESKAANLNNLVVEAYQKLISEVKVQVENQVQGIYFNITAICPDGSRKPGMEGCRNVTSNDEVLFNVTVTMKKCDVTGGKNYAIIKPIGFNETAKIHIHRNCSCQCEDNRGPKGKCVDETFLDSKCFQCDENKCHFDEDQFSSESCKSHKDQPVCSGRGVCVCGKCSCHKIKLGKVYGKYCEKDDFSCPYHHGNLCAGHGECEAGRCQCFSGWEGDRCQCPSAAAQHCVNSKGQVCSGRGTCVCGRCECTDPRSIGRFCEHCPTCYTACKENWNCMQCLHPHNLSQAILDQCKTSCALMEQQHYVDQTSECFSSPSYLRIFFIIFIVTFLIGLLKVLIIRQVILQWNSNKIKSSSDYRVSASKKDKLILQSVCTRAVTYRREKPEEIKMDISKLNAHETFRCNF

SEQ ID NO: 158 - DNA, 3999 bp, Homo sapiens
caagattccacatttgatggggtgactgacaaacccatcttagactgctgtgcctgcggaactgccaagtacagactcacattttatgggaattggtccgagaagacacacccaaaggattaccctcgtcgggccaaccactggtctgcgatcatcggaggatcccactccaagaattatgtactgtgggaatatggaggatatgccagcgaaggcgtcaaacaagttgcagaattgggctcacccgtgaaaatggaggaagaaattcgacaacagagtgatgaggtcctcaccgtcatcaaagccaaagcccaatggccagcctggcagcctctcaacgtgagagcagcaccttcagctgaattttccgtggacagaacgcgccatttaatgtccttcctgaccatgatgggccctagtcccgactggaacgtaggcttatctgcagaagatctgtgcaccaaggaatgtggctgggtccagaaggtggtgcaagacctgattccctgggacgctggcaccgacagcggggtgacctatgagtcacccaacaaacccaccattccccaggagaaaatccggcccctgaccagcctggaccatcctcagagtcctttctatgacccagagggtgggtccatcactcaagtagccagagttgtcatcgagagaatcgcacggaagggtgaacaatgcaatattgtacctgacaatgtcgatgatattgtagctgacctggctccagaagagaaagatgaagatgacacccctgaaacctgcatctactccaactggtccccatggtccgcctgcagctcctccacctgtgacaaaggcaagaggatgcgacagcgcatgctgaaagcacagctggacctcagcgtcccctgccctgacacccaggacttccagccctgcatgggccctggctgcagtgacgaagacggctccacctgcaccatgtccgagtggatcacctggtcgccctgcagcatctcctgcggcatgggcatgaggtcccgggagaggtatgtgaagcagttcccggaggacggctccgtgtgcacgctgcccactgaggaaacggagaagtgcacggtcaacgaggagtgctctcccagcagctgcctgatgaccgagtggggcgagtgggacgagtgcagcgccacctgcggcatgggcatgaagaagcggcaccgcatgatcaagatgaaccccgcagatggctccatgtgcaaagccgagacatcacaggcagagaagtgcatgatgccagagtgccacaccatcccatgcttgctgtccccatggtccgagtggagtgactgcagcgtgacctgcgggaagggcatgcgaacccgacagcggatgctcaagtctctggcagaacttggagactgcaatgaggatctggagcaggtggagaagtgcatgctccctgaatgccccattgactgtgagctcaccgagtggtcccagtggtcggaatgtaacaagtcatgtgggaaaggccacgtgattcgaacccggatgatccaaatggagcctcagtttggaggtgcaccctgcccagagactgtgcagcgaaaaaagtgccgcatccgaaaatgccttcgaaatccatccatccaaaagctacgctggagggaggcccgagagagccggcggagtgagcagctgaaggaagagtctgaaggggagcagttcccaggttgtaggatgcgcccatggacggcctggtcagaatgcaccaaactgtgcggaggtggaattcaggaacgttacatgactgtaaagaagagattcaaaagctcccagtttaccagctgcaaagacaagaaggagatcagagcatgcaatgttcatccttgttagcaagggtacgagttccccagggctgcactctagattccagagtcaccaatggctggattatttgcttgtttaagacaatttaaattgtgtacgctagttttcatttttgcagtgtggttcgcccagtagtcttgtggatgccagagacatcctttctgaatacttcttgatgggtacaggctgagtggggcgccctcacctccagccagcctcttcctgcagaggagtagtgtcagccaccttgtactaagctgaaacatgtccctctggagcttccacctggccagggaggacggagactttgacctactccacatggagaggcaaccatgtctggaagtgactatgcctgagtcccagggtgcggcaggtaggaaacattcacagatgaagacagcagattccccacattctcatctttggcctgttcaatgaaaccattgtttgcccatctcttcttagtggaactttaggtctcttttcaagtctcctcagtcatcaatagttcctggggaaaaacagagctggtagacttgaagaggagcattgatgttgggtggcttttgttctttcactgagaaattcggaatacatttgtctcacccctgatattggttcctgatgcccccccaacaaaaataaataaataaattatggctgctttatttaaatataaggtagctagtttttacacctgagataaataataagcttagagtgtatttttcccttgcttttgggggttcagaggagtatgtacaattcttctgggaagccagccttctgaactttttggtactaaatccttattggaaccaagacaaaggaagcaaaattggtctctttagagaccaatttgcctaaattttaaaatcttcctacacacatctagacgttcaagtttgcaaatcagtttttagcaagaaaacatttttgctatacaaacattttgctaagtctgcccaaagcccccccaatgcattccttcaacaaaatacaatctctgtactttaaagttattttagtcatgaaattttatatgcagagagaaaaagttaccgagacagaaaacaaatctaagggaaaggaatattatgggattaagctgagcaagcaattctggtggaaagtcaaacctgtcagtgctccacaccagggctgtggtcctcccagacatgcataggaatggccacaggtttacactgccttcccagcaattataagcacaccagattcagggagactgaccaccaagggatagtgtaaaaggacattttctcagttgggtccatcagcagtttttcttcctgcatttattgttgaaaactattgtttcatttcttcttttataggccttattactgcttaatccaaatgtgtaccattggtgagacacatacaatgctctgaatacactacgaatttgtattaaacacatcagaatatttccaaatacaacatagtatagtcctgaatatgtacttttaacacaagagagactattcaataaaaactcactgggtctttcatgtctttaagctaagtaagtgttcagaaggttcttttttatattgtcctccacctccatcattttcaataaaagatagggcttttgctcccttgttcttggagggaccattattacatctctgaactacctttgtatccaacatgttttaaatccttaaatgaattgctttctcccaaaaaaagcacaatataaagaaacacaagatttaattatttttctacttggggggaaaaaagtcctcatgtagaagcacccacttttgcaatgttgttctaagctatctatctaactctcagcccatgataaagttccttaagctggtgattcctaatcaaggacaagccaccctagtgtctcatgtttgtatttggtcccagttgggtacattttaaaatcctgattttggagacttaaaaccaggttaatggctaagaatgggtaacatgactcttgttggattgttattttttgtttgcaatggggaatttataagaagcatcaagtctctttcttaccaaagtcttgttaggtggtttatagttcttttggctaacaaatcattttggaaataaagattttttactacaaaaatg

SEQ ID NO: 159 - protein, 624 aa, Homo sapiens
QDSTFDGVTDKPILDCCACGTAKYRLTFYGNWSEKTHPKDYPRRANHWSAIIGGSHSKNYVLWEYGGYASEGVKQVAELGSPVKMEEEIRQQSDEVLTVIKAKAQWPAWQPLNVRAAPSAEFSVDRTRHLMSFLTMMGPSPDWNVGLSAEDLCTKECGWVQKVVQDLIPWDAGTDSGVTYESPNKPTIPQEKIRPLTSLDHPQSPFYDPEGGSITQVARVVIERIARKGEQCNIVPDNVDDIVADLAPEEKDEDDTPETCIYSNWSPWSACSSSTCDKGKRMRQRMLKAQLDLSVPCPDTQDFQPCMGPGCSDEDGSTCTMSEWITWSPCSISCGMGMRSRERYVKQFPEDGSVCTLPTEETEKCTVNEECSPSSCLMTEWGEWDECSATCGMGMKKRHRMIKMNPADGSMCKAETSQAEKCMMPECHTIPCLLSPWSEWSDCSVTCGKGMRTRQRMLKSLAELGDCNEDLEQVEKCMLPECPIDCELTEWSQWSECNKSCGKGHVIRTRMIQMEPQFGGAPCPETVQRKKCRIRKCLRNPSIQKLRWREARESRRSEQLKEESEGEQFPGCRMRPWTAWSECTKLCGGGIQERYMTVKKRFKSSQFTSCKDKKEIRACNVHPC

SEQ ID NO: 160 - DNA, 3408 bp, Homo sapiens
caaaaaggctattacctgtggggaaaaggaaaagcaagatctcattaagagccttgccatgttgaaggacggcttccgcactgacagggggtctcactcagacctgtggtccagcagcagctctctggagagttcgagtttcccgctaccgaaacagtacctggatgtgagctcccagacagacatctcgggaagcttcggcatcaacagcaacaatcagttggcagagaaggtcagattgcgccttcgatatgaagaggctaagagaaggatcgccaacctgaagatccagctggccaagcttgacagtgaggcctggcctggggtgctggactcagagagggaccggctgatccttatcaacgagaaggaggagctgctgaaggagatgcgcttcatcagcccccgcaagtggacccagggggaggtggagcagctggagatggcccggaagcggctggaaaaggacctgcaggcagcccgggacacccagagcaaggcgctgacggagaggttaaagttaaacagtaagaggaaccagcttgtgagagaactggaggaagccacccggcaggtggcaactctgcactcccagctgaaaagtctctcaagcagcatgcagtccctgtcctcaggcagcagccccggatccctcacgtccagccggggctccctggttgcatccagcctggactcctccacttcagccagcttcactgacctctactatgacccctttgagcagctggactcagagctgcagagcaaggtggagttcctgctcctggagggggccaccggcttccggccctcaggctgcatcaccaccatccacgaggatgaggtggccaagacccagaaggcagagggaggtggccgcctgcaggctctgcgttccctgtctggcaccccaaagtccatgacctccctatccccacgttcctctctctcctccccctccccaccctgttcccctctcatggctgaccccctcctggctggtgatgccttcctcaactccttggagtttgaagacccggagctgagtgccactctttgtgaactgagccttggtaacagcgcccaggaaagataccggctggaggaaccaggaacggagggcaagcagctgggccaagctgtgaatacggcccaggggtgtggcctgaaagtggcctgtgtctcagccgccgtatcggacgagtcagtggctggagacagtggtgtgtacgaggcttccgtgcagagactgggtgcttcagaagctgctgcatttgacagtgacgaatcggaagcagtgggtgcgacccgaattcagattgccctgaagtatgatgagaagaataagcaatttgcaatattaatcatccagctgagtaacctttctgctctgttgcagcaacaagaccagaaagtgaatatccgcgtggctgtccttccttgctctgaaagcacaacctgcctgttccggacccggcctctggacgcctcagacactctagtgttcaatgaggtgttctgggtatccatgtcctatccagcccttcaccagaagaccttaagagtcgatgtctgtaccaccgacaggagccatctggaagagtgcctgggaggcgcccagatcagcctggcggaggtctgccggtctggggagaggtcgactcgctggtacaaccttctcagctacaaatacttgaagaagcagagcagggagctcaagccagtgggagttatggcccctgcctcagggcctgccagcacggacgctgtgtctgctctgttggaacagacagcagtggagctggagaagaggcaggagggcaggagcagcacacagacactggaagacagctggaggtatgaggagaccagtgagaatgaggcagtagccgaggaagaggaggaggaggtggaggaggaggagggagaagaggatgttttcaccgagaaagcctcacctgatatggatgggtacccagcattaaaggtggacaaagagaccaacacggagaccccggccccatcccccacagtggtgcgacctaaggaccggagagtgggcaccccgtcccaggggccatttcttcgagggagcaccatcatccgctctaagaccttctccccaggaccccagagccagtacgtgtgccggctgaatcggagtgatagtgacagctccactctgtccaaaaagccaccttttgttcgaaactccctggagcgacgcagcgtccggatgaagcggccttcctcggtcaagtcgctgcgctccgagcgtctgatccgtacctcgctggacctggagttagacctgcaggcgacaagaacctggcacagccaactgacccaggagatctcggtgctgaaggagctcaaggagcagctggaacaagccaagagccacggggagaaggagctgccacagtggttgcgtgaggacgagcgtttccgcctgctgctgaggatgctggagaagcggatggaccgagcggagcacaagggtgagcttcagacagacaagatgatgagggcagctgccaaggatgtgcacaggctccgaggccagagctgtaaggaacccccagaagttcagtctttcagggagaagatggcatttttcacccggcctcggatgaatatcccagctctctctgcagatgacgtctaatcgccagaaaagtatttcctttgttccactgaccaggctgtgaacattgactgtggctaaagttatttatgtggtgttatatgaaggtactgagtcacaagtcctctagtgctcttgttggtttgaagatgaaccgactttttagtttgggtcctactgttgttattaaaaacagaacaaaaacaaaacacacacacacacaaaaacagaaacaaaaaaaaccagcattaaaataataagattgtatagtttgtatatttaggagtgtatttttgggaaagaaaatttaaatgaactaaagcagtattgagttgctgctcttcttaaaatcgtttagattttttttggtttgtacagctccaccttttagaggtcttactgcaataagaagtaatgcctgggggacggtaatcctaataggacgtcccgcacttgtcacagtacagctaatttttcctagttaacatattttgtacaatattaaaaaaatgcacagaaaccattgggggggattcagaggtgcatccacggatcttcttgagctgtgacgtgtttttatgtggctgcccaacgtggagcgggcagtgtgataggctgggtgggctaagcagcctagtctatgtgggtgacaggccacgctggtctcagatgcccagtgaagccactaacatgagtgaggggagggctgtggggaactccattcagttttatctccatcaataaagtggcctttcaaaaag

SEQ ID NO: 161 - protein, 888 aa, Homo sapiens
KKAITCGEKEKQDLIKSLAMLKDGFRTDRGSHSDLWSSSSSLESSSFPLPKQYLDVSSQTDISGSFGINSNNQLAEKVRLRLRYEEAKRRIANLKIQLAKLDSEAWPGVLDSERDRLILINEKEELLKEMRFISPRKWTQGEVEQLEMARKRLEKDLQAARDTQSKALTERLKLNSKRNQLVRELEEATRQVATLHSQLKSLSSSMQSLSSGSSPGSLTSSRGSLVASSLDSSTSASFTDLYYDPFEQLDSELQSKVEFLLLEGATGFRPSGCITTIHEDEVAKTQKAEGGGRLQALRSLSGTPKSMTSLSPRSSLSSPSPPCSPLMADPLLAGDAFLNSLEFEDPELSATLCELSLGNSAQERYRLEEPGTEGKQLGQAVNTAQGCGLKVACVSAAVSDESVAGDSGVYEASVQRLGASEAAAFDSDESEAVGATRIQIALKYDEKNKQFAILIIQLSNLSALLQQQDQKVNIRVAVLPCSESTTCLFRTRPLDASDTLVFNEVFWVSMSYPALHQKTLRVDVCTTDRSHLEECLGGAQISLAEVCRSGERSTRWYNLLSYKYLKKQSRELKPVGVMAPASGPASTDAVSALLEQTAVELEKRQEGRSSTQTLEDSWRYEETSENEAVAEEEEEEVEEEEGEEDVFTEKASPDMDGYPALKVDKETNTETPAPSPTVVRPKDRRVGTPSQGPFLRGSTIIRSKTFSPGPQSQYVCRLNRSDSDSSTLSKKPPFVRNSLERRSVRMKRPSSVKSLRSERLIRTSLDLELDLQATRTWHSQLTQEISVLKELKEQLEQAKSHGEKELPQWLREDERFRLLLRMLEKRMDRAEHKGELQTDKMMRAAAKDVHRLRGQSCKEPPEVQSFREKMAFFTRPRMNIPALSADDV

SEQ ID NO: 162 - DNA, 5794 bp, Homo sapiens
ggagtggaaatgatcgccactctaagtcaacagttggatccagtgacaactcatctcctcagcccctgaagaggaaagggaaaaaagaagacgtgaattcagaaaaactgacgaaattgaaacaaaatgtaaaattaaagaattcacaagaaaccattccaaatagtgatgaaggcattttcaaagctggagcagagaggtctgaaacacggggggcagcagaagtccaagaagatgaagatactcaggttgaggttccagtcgatcagaggccagcagaaatagtagacgaggaagaagatggagagaaggcaaacaaggatgcagaacagaaagaagacttttcaggaatgaatggtgaccttgaagaggaaggaggtagggaggctacagatgcccctgagcaagtcgaggagattctggatcacagtgagcagcaggcacgccctgctcgtgtaaatggaggcaccgatgaggagaatggtgaggagctgcagcaggttaataatgagcttcaactggtcctagacaaggaaagaaagtctcaaggagctggcagtggacaagatgaggctgatgtagaccctcaaagaccaccaaggccagaagtaaaaattaccagtccagaagaaaatgaaaacaaccaacaaaacaaggactatgctgccgtggcttagaacatttttaaaaagagagtatatggatcgcaagaaaaatgaagggttatcatacttgaaagataagcacatagttattgctgaatataatgtgacactatggtcgaatactacctacgaattataacattagaagcctagtggaaagaccagataactttaaatggctactaaaggataattacttacttttattgcatgtgttttaaaagtcatatagaaatattaaataagacggacagaggagaatttgcactggaagacaattgccacttgtaaaggatgaaaaataggatcactcttattgtacgctttattataagtttagaaggcagtttattctaaataatttttctctaggaaggcgtagaattttaaagaactggtaataggaaagcatgtactattttcttaaagcaataaactcttgaatgaacagattgcgatttactttcagacataatttggagatggcagtagatcaaaatgtgtccatgacttgttaacatgcctttctttcttcctccttagccaaaatccacctttgaactacaaagacagagcaaggcgttcattttggtgggaggaagcattggttcagagtgttagtgactagtatcgccatgccgtcacttaaatgctttcaggcttgcatgcttgtggctccaatggcgcacactcaggaaggaattgtaaaggagcacccagttatattataaagcctggatgtatggtttgcagataatggaaatcctgtggattttcactgatccagtctatctttaccaatagtatctctctcttctcccttatgttattagagaacctgatattggctattccaaagattaaattattttcaaatagttttcaacaaaaataaaagtgtattaggaagaaaaaagtagactatatgaagagtttgtgactgctcaatttaacttgtttttttgccttatttctattaagactgttttactatgtttttgccctagggatatcagcaaatatttatttttcctagcatgatatagttagaatttcaagcagatttctttgtaattagaaggcatctgatagaaattgtaaaactttagaagttattataatgaaaccaattcctgaatcacaacttcatggactgactaaattgatttatagttgccttgtgaggtatgtatggggaaaacataaaaacataattaaaacataatttcgtcctttttatgaattcttaagagatgttcttccataaatatagaaataatatatttttcttaaaggatatatttttaattatgtggaagttgtaagcttgaaattttaacttctagtgcttttctaaaattcacaattacaagtttaaaacattttttctcttccaggtttcatttggaataaagagttggcagttatataaagcacttaataatactatagaaaatagatgtgttttttcttaatatgattttggtattttccacagatcagaagtgtaaacagagagataatgtaacagtatttggaagagataatgacacaaggatatagtgatctgggagcatgaattagaaacagggtactatgtttctggtgtaaaatctaaattgtgctttctactagcgttactttttcaaatgggatgatataaagcactgtgggctataagcaacaatcttgggttgctaggcaaatagaccaattgatctttattattattattattattattattatttttttttgagatgaagtcttgctcttgtcgcccaggctgggtgcagtggcatgatcttggcttactgcaacctctgcctcctgggttcaagcacctgagcctcccgagtagctgggattacaggcatctgccaccacacctggctaatttttgtattttttgtagagacagatgtttcaccatgttggccaggctggtctcaaactcctgacctcaggtgatccgcccgcctttgcatcccaaaatgctgggattacaggtgtgagccacagcacccggtcccagttggtcttttaatattaaatttgtgcactattactgggtctggagttaatgatttcaaatagtttctaaaaataactgattaaatgtaagaaattataactaattatcaaggtgattctcttttgtttcttcaatggagagtttctctttctcttttcctcctctaataaaaatatttctttttttcctgtccttttattcattatattatgaaacttaggttttaggaaacaccttaagcgtcattttaatgaagcacaacattgatattttacatgaataataacgtttggtattttaaatatacttcaagggggtaataagccacaataactgtaccaaaaaaacttaaaaatggggacatattcatcccttgtgtgtgcatattttaccacttgttgacaagatacaattgtgacctactttgaggggatgaataacgacttatcactttaagacactttgcaaacatgttactaaaaaaaggtgcctagccaaggaaaaaaccattcacttggaattaaaattgtggatgtcacttcagagatgactttaacataaatgctgaaagttcattcacctcacaaatgtggcagttttctctgtggagaatggtggtctccgtggcagactggctctccaaattaaatgaaactcattgacagacctgggaccttttatgtgagtggacagacaagatcttggtttggcttcatgtactgttttctagagagagtgctacgaaaaacttatgatgcttttatgtgataaccaatataatgctttaatatgttaattctttgtgatgctatatacatagtttttatagttttatgaaaccactttgttaaacttatctggattttaagacacttgtaaacaaatggtttgttagtaaaattggggcattaagagttttacagagcaaataaagaagattttgacaaaagtcattttgaggctaagggtgttttacctgggttaacttctgttaaaatagctattgagtgcccattgacttataaaatacgatactatgaccataaaataactttttacttcttattcttctctatgaccttaggatgactttattttttttaagacatttttcctatatgtttttgggggaatgttaggttgccacactcataggaaaagtgtgatgctatcatgcctcctgttttattgtaaaggtgtgaattcttgctatgtggtgtgtgaagacagaactatcccatacatacgtggttcagagtgagatatctctaggctcacagttgtgaacccatattaatatggtattattcctgccaactcttccaatttatagctcataaactaacatcctaaacattgtcattgaatgacctaccttatacacaaaggataaagttcattcacctagaaaaaaaatctgtgcatttaaattagtggccgcaagacaacaggaagctttctttcattttttgttcaacaaaccttgcaaaagcaaagtttaaaaagtagattaattcatcaacagaaagcatcacatggaaactgtggccaatctgaagagaaatatagcatgtagacatagatatgtatcaaatacttatacagatgcactcacacactttaaaacattaaaaaggcctcctgaggcacagcgttattaataaaacaaggctcttttgggtgaagttgagagaagcaatgagttaaaacgtgagaggaaatgctaagaaatgatatatattatggtgctttaaatcttgatttcctaagactttaagagatttaaaattcttctccaaataagaaaccagcatgtcaatgaaaaatgtattctagggaggtgttgaaacaaatccggtttttaaaatgtgatatatcacataaaccaaaacagaaaccaagacatatcttgttttcctgaagtaactacagagcatggttcttttccatcaaccttaagcacgatacatttcaggtgtagattcttttataccaatacagattctgttattactgtttgtgaccatgtgtgtgcatgtgtgatttacatagatgtgtcaggactctttttcataccagttagccggggtatcacaaatagaatgaaagactgacttattggtccattagtttatataatgttcaggttcagtgcggaagcattttggcattcttcaggaatgaaaccatttttaaaaggttagtctgttactctaagatgatgaacacatacagttctttgtcattaaatatcatttttgtaaataccacaagatttttcctctttaaaacatatcgggacatttagatgggactgatttttgttctccctacatgaaatttgtatatttcctcccatgaagtttgagtgacatgaatggggaatacaagagtgttcccttatgttgataaggaaaaagatactgttttttgaagaggcataacatcctgtaggagatggggagttaggacagtttttaaaaatgcctggattaccataaggcatttataaaatgaggaggtgtaaccagtggagctctgttgacttaacgccaacaacgacttcagctttactctaagaatgggaccagatgaattctctgtagtttcatcagcttgaacgatatagtttgtttcatttattgtcacgaatgcaatgacatatggaaagagggaatgattgtagtcattcttaggagaattttcgagaaagcctgttttgtcttttgcttcagtgttttttcttgtgccttaaatctttaatgggtacaatgataatgggtgattgttgatgtaagtaaagattaaattgaaggccagcacggtggttcacacctgtaatcccagcacgttgggaggctgaggcgggtggatcacgaggtcaggagatcgagaccatcctggctaacatggtgaaaccccgtctctactacaaatacaaaaaattagccaggcgtggtggcgggtgcctgtagtcccagctactcaagaggctgaggcaggagaatggcgtgaagccaggaggcggagcttgctgtgagccgagatcgcgccactgcactccagcctgggcgacagagcgagactccgtctc

SEQ ID NO: 163 - protein, 224 aa, Homo sapiens
SGNDRHSKSTVGSSDNSSPQPLKRKGKKEDVNSEKLTKLKQNVKLKNSQETIPNSDEGIFKAGAERSETRGAAEVQEDEDTQVEVPVDQRPAEIVDEEEDGEKANKDAEQKEDFSGMNGDLEEEGGREATDAPEQVEEILDHSEQQARPARVNGGTDEENGEELQQVNNELQLVLDKERKSQGAGSGQDEADVDPQRPPRPEVKITSPEENENNQQNKDYAAVA

SEQ ID NO: 164 - DNA, 5759 bp, Homo sapiens
gtcttggttagttaaaaaaaaaaaaaaagttggccaggcacagtggcttgcacctgtaatcccagcactttgggaggccgaggcaggcggatcacctgaggttgggagttcgagaccaacctgaccaacatggagaaacccatctctactaaaaatacaaaattatccggtcatggtggcacgcgcctatgatcccacctactcgggaggctaaggcaagagaattgcttgaacccgtgaggcagaggttgcagtgaaccgagattgcgccactgcactccagcctgggtgactgagggagactctgtctcaaaataaataaataaataaaaggttaattatatttcttgttatgagacaaatgaagtatttcacattttccattgacgatagcatgtaacgcaggtttttctcttataggttgtgggactggaaaatatcttaaagtgaacagccaggtacataccgtgggctgtgactactgtgggccactggtagagattgcccggaatagaggatgtgaagccatggtatgtgacaaccttaatctcccctttagggatgagggcttcgatgccatcatctccataggagtcatacatcatttttctacaaaacaaagaagaatcagagcaataaaagaaatggccagggtcttagttcccggaggccaactgatgatttacgtttgggcaatggaacaaaagaaccgtcgctttgagaagcaagacgtgcttgttccatggaacagggccctgtgttcccagctcttctcagagtccagccagtctgggaggaagaggcagtgtggatacccagaaagaggccatccctaccatcctccttgctctgagtgtagctgttctgtttgttttaaagagcagggtggttcaaaacggtcccacagcgtgggctatgaacctgctatggcaagaacctgttttgcaaatatttctaaggaaggcgaggaagaatatggattttacagcacattaggaaaatcgtttcgttcctggtttttctccagatctttggatgaatcgactctgaggaagcaaattgaaagagtaagacccttgaaaaacacagaagtttgggccagtagcactgtaacagtccagccttccagacactctagtctagactttgatcaccaagagccattttcaacaaaagagcaaagtttagatgaggaagtgtttgtggaatcttcttctggaaaacacttggagtggctgagagcaccaggcactctgaaacatttaaatggagaccatcaaggggaaatgaggagaaatggagggggaaattttctggatagcactaatactggtgtgaattgtgtggatgcaggcaacatagaagatgataatccttctgctagtaaaatattgagaaggatttctgcagtcgattccacagatttcaacccagatgatacaatgtctgtcgaagatccacagactgatgttttggactccacagcctttatgcgctactaccatgtgtttcgagaaggggagctctgcagtctgctcaaggagaatgtgtcagagctccgtatcctgagttctgggaatgatcatggtaactggtgtatcattgcagagaaaaagggaggttgtgattgattggatccttttagacaactcctccaaaagatgaaccacattcttttctcttggtttgatatggttacctgaatttgcattcagtgttatttgttaatccatttacgctttggtctgcagagactattaattatttggttgtttttgttttcatgtttgaataagcacagattctggcattgaaagcacttgacaaagggtatttgtgcttaaatgttaatataaaagatctgaagaagcaacagaaagtacccttcagtacacctcagacttttttttaaccccagagagataaaatacatgtatagtgtttttcagtattacacattgatttaaaaagattatgctgttaaataatcttttaaaacggtatttttataaagtgaggggataatttctggttctcaggttataactgagagcagtgtgcaagataataggtaaatttgatccattgcacagatatactttgaaccatgtgatgagttatcttgttgccaaggccttgcttctacttaaagttttcagaaaactgagtgacagtggagagaaccaagaagttttacaaggactttactaaattataagcaaacttgcttcaaaataagttgacatgtgataataaggttttcaatgtagcccaggaggtttttaaaggcactgttaggctgagcatggtggctcatgcctgtaatcccagcactttgggaggccaaggcagaagcatcacttgaacccaggagttcaagaatagcctgggcaacatagcgagacctcatctctataaaaattagcaagatgtggtggtgcatgcctgtcatccaagctactcaggagactgaggcaggaggatcacgtgagcccaggaattcaaggctgcagtgaactatgattgcatcactgcactgcagcctgggcaacatagcaagactctgtctcaaaataataataataataataataaaggcattgttagcttgtaaggagtggagtatgtaggtagtaggagttatatgcaagtacccaagtggtattcttccaatcttattagaagcatgaatattcaagattgatattactattgcttattagcaagattgttatcaatcatgcttattagaaggatgaatatccaagaccaagattgactaatgatgagtctgcatcaagaactaggcatttcttctgagttgacggactctttaggaaaggagaatctaagtgaagcactgattttagctctgagaacaaacaaattaaggtacagcatagttagccttggtagaggtatgacttggatttgctgtatcctttaaaatagtatctgggcatttattttattgaaggtgactacattttattagttatattaggaatttaggtagaatcaacttctactgattacaggttgaatttctgtcactttgtagagaaacgaatagactggacactgtgtggtcactgtttagatttgcccatgggtctgtttaaatctatgtcatggatcctgagacacaaatataattaagacaggtctagagacaggagaagcagaaataagttgacccaggagtacagtctcaagtagttcattaatgagaaaattgacatctgacaagagtctttttactttatgctggatgaaaatccaaatcttgttttattttttccactaaaagtgactaaaataataacgaatttcatttgttcttgggttcttttttcctttaatgattgtgctataacttaaaataatgatgttacttttgaacaaacttaaagaaatatttttaaagcgtatctgaaaacgattgatgtttataactctcttttggcttcaaaataagattgtgttatcaccattttggtagatgaggttgtctggtgaaaatgatgcatatgagttgtactgttcagtgtacatcctgcagtagtggatgattgaaaacatatataagtggagtataaattaaaaattaatttggtttcttctatttctttttttttttttttttttttttttgagacagagtctcgctctgtcgcccaggctggagtgcactggcgcgatctcggctcactgtaagctccgcctcccgggttcacgccatcctcctgcctcagcctcccaagtagctgggactactggcacccaccacgacgcccggctgtttttttgtatttttaggagagacggggtttcgccgtgttggccaggatggtctcgatctcctgacgtcgtgatccacccgcctcggccccccacagtgctgggattacaggcatgagccaccgcgcccggcctgttccttttatttcttaattcaggacactaaaccatgactgcaagggattttcttggtaaaaagaaaagattctcagagtcaaaatgttcttacaactcgggcttgacggcctttgaattatgaatggattgttcctctctctgaagcctattgtcacatgggtttttaatcctggccttgctgctagaaatctgtgcttgaagtcctctctttctgctggtagcctaccagttaaaagtcaagacttggtggaactcagtttaccagactctttagcctttgagctaaactgtctgagcaacctcttagatgtgcacacaccactttgtatgaaagggttctctagaacggttctttggagagaaatattttcatgtacgtttgacaggggtgtaaataaagcatgctgactaataagtcttttactcttcatctaatgaacataagaatctatgcatccagatattattttgtatacaaatatttaatttggtgattgataatctctctttggggtagtcacatggaaagctcttttaaatttaacttccgcctttggattttttttaaaaagccattgaagagcaaaactaatgtaaacgtcttgatcatttaaaaagcttgcttgtcctcgaaaggaaacacaggtcatcagtgagtataaacgtagacagttgatttgtgaatgctgtcggcctcaacttgcttgatgatagattctactgacctagctggagtaatctgatcacttacttccttattaatactagatcacacagtgtctttcttattccttcttctttacttactggcatcagcacagagtcccactatctgaaatagaagggagagtttgggggtttattggaggagtcttaaaaacttggttggcagctgggtacggtgactcacacctgtactcccagcacttcaggaagctgaggtgggtggatcagctgaggtcaggagtttgggaccagcctgaccaacatggtgaaaccccgtctttattaaatacaaaaaattagccaggttggtggcgcatgcctgtggtcccagctacttgggaggctgaggcaggagaatcgcttgaacctgggaggcggaggttgcagtgagccgagattgtgccattgcactccaacctgggcaacaagagtgaaactccatctccaacaaaacaaaactttgctggcttcctgatgcctcactgtctatttgaggaattccacagaatcttcaaaggatttgggggaaagcgcattaacatggacaaaggatggaatcaaaataatgttatagtgagaatcattcaagcacctatttaaattttttccaattgccagtatagtgatgatatgacaccagcatatcaaagtaactaacaaactagctacacaaacgtcttggagtttggtttcgttctcttttctcatcatagatctccgtgcagaatagtgctaattcttatttctcgtttgcctttctatttccttccaaattctacatgccagtaattcctctgtcttttaagtgaccatcaattcaataggcaaaaatttggagtaatccagagaaaaaaccatccaaatataaaccagctaggaacatgaatgcccctgattattaatggccaaaaaaaaaagcactggtggattttaaattaaattaatacatatatacgagtttggaggagaacagaagttctaactcagtacttgaacttggtgggggagggcacaggttaaatatgagctgtgagcccccagttttggaggaaggaggaaatgggaaccaaccaccagacaagcagctgcagtct

SEQ ID NO: 165 - protein, 421 aa, Homo sapiens
SISHFPLTIACNAGFSLIGCGTGKYLKVNSQVHTVGCDYCGPLVEIARNRGCEAMVCDNLNLPFRDEGFDAIISIGVIHHFSTKQRRIRAIKEMARVLVPGGQLMIYVWAMEQKNRRFEKQDVLVPWNRALCSQLFSESSQSGRKRQCGYPERGHPYHPPCSECSCSVCFKEQGGSKRSHSVGYEPAMARTCFANISKEGEEEYGFYSTLGKSFRSWFFSRSLDESTLRKQIERVRPLKNTEVWASSTVTVQPSRHSSLDFDHQEPFSTKEQSLDEEVFVESSSGKHLEWLRAPGTLKHLNGDHQGEMRRNGGGNFLDSTNTGVNCVDAGNIEDDNPSASKILRRISAVDSTDFNPDDTMSVEDPQTDVLDSTAFMRYYHVFREGELCSLLKENVSELRILSSGNDHGNWCIIAEKKGGCD

SEQ ID NO: 166 - DNA, 1454 bp, Homo sapiens
accagcggcagaccacaggcagggcagaggcacgtctgggtcccctccctccttcctatcggcgactcccagatcctggccatgagagctccgcacctccacctctccgccgcctctggcgcccgggctctggcgaagctgctgccgctgctgatggcgcaactctgggccgcagaggcggcgctgctcccccaaaacgacacgcgcttggaccccgaagcctatggcgccccgtgcgcgcgcggctcgcagccctggcaggtctcgctcttcaacggcctctcgttccactgcgcgggtgtcctggtggaccagagttgggtgctgacggccgcgcactgcggaaacaagccactgtgggctcgagtaggggatgatcacctgctgcttcttcagggcgagcagctccgccggacgactcgctctgttgtccatcccaagtaccaccagggctcaggccccatcctgccaaggcgaacggatgagcacgatctcatgttgctaaagctggccaggcccgtagtgccggggccccgcgtccgggccctgcagcttccctaccgctgtgctcagcccggagaccagtgccaggttgctggctggggcaccacggccgcccggagagtgaagtacaacaagggcctgacctgctccagcatcactatcctgagccctaaagagtgtgaggtcttctaccctggcgtggtcaccaacaacatgatatgtgctggactggaccggggccaggacccttgccagagtgactctggaggccccctggtctgtgacgagaccctccaaggcatcctctcgtggggtgtttacccctgtggctctgcccagcatccagctgtctacacccagatctgcaaatacatgtcctggatcaataaagtcatacgctccaactgatccagatgctacgctccagctgatccagatgttatgctcctgctgatccagatgcccagaggctccatcgtccatcctcttcctccccagtcggctgaactctccccttgtctgcactgttcaaacctctgccgccctccacacctctaaacatctcccctctcacctcattcccccacctatccccattctctgcctgtactgaagctgaaatgcaggaagtggtggcaaaggtttattccagagaagccaggaagccggtcatcacccagcctctgagagcagttactggggtcacccaacctgacttcctctgccactccccgctgtgtgactttgggcaagccaagtgccctctctgaacctcagtttcctcatctgcaaaatgggaacaatgacgtgcctacctcttagacatgttgtgaggagactatgatataacatgtgtatgtaaatcttcatgtgattgtcatgtaaggcttaacacagtgggtggtgagttctgactaaaggttacctgttgtcgtgaaaaaaaaaaaaaa

SEQ ID NO: 167 - protein, 276 aa, Homo sapiens
MRAPHLHLSAASGARALAKLLPLLMAQLWAAEAALLPQNDTRLDPEAYGAPCARGSQPWQVSLFNGLSFHCAGVLVDQSWVLTAAHCGNKPLWARVGDDHLLLLQGEQLRRTTRSVVHPKYHQGSGPILPRRTDEHDLMLLKLARPVVPGPRVRALQLPYRCAQPGDQCQVAGWGTTAARRVKYNKGLTCSSITILSPKECEVFYPGVVTNNMICAGLDRGQDPCQSDSGGPLVCDETLQGILSWGVYPCGSAQHPAVYTQICKYMSWINKVIRSN

SEQ ID NO: 168 - DNA, 1506 bp, Homo sapiens
aggcggacaaagcccgattgttcctgggccctttccccatcgcgcctgggcctgctccccagcccggggcaggggcgggggccagtgtggtgacacacgctgtagctgtctccccggctggctggctcgctctctcctggggacacagaggtcggcaggcagcacacagagggacctacgggcagctgttccttcccccgactcaagaatccccggaggcccggaggcctgcagcaggagcggccatgaagaagctgatggtggtgctgagtctgattgctgcagcctgggcagaggagcagaataagttggtgcatggcggaccctgcgacaagacatctcacccctaccaagctgccctctacacctcgggccacttgctctgtggtggggtccttatccatccactgtgggtcctcacagctgcccactgcaaaaaaccgaatcttcaggtcttcctggggaagcataaccttcggcaaagggagagttcccaggagcagagttctgttgtccgggctgtgatccaccctgactatgatgccgccagccatgaccaggacatcatgctgttgcgcctggcacgcccagccaaactctctgaactcatccagccccttcccctggagagggactgctcagccaacaccaccagctgccacatcctgggctggggcaagacagcagatggtgatttccctgacaccatccagtgtgcatacatccacctggtgtcccgtgaggagtgtgagcatgcctaccctggccagatcacccagaacatgttgtgtgctggggatgagaagtacgggaaggattcctgccagggtgattctgggggtccgctggtatgtggagaccacctccgaggccttgtgtcatggggtaacatcccctgtggatcaaaggagaagccaggagtctacaccaacgtctgcagatacacgaactggatccaaaaaaccattcaggccaagtgaccctgacatgtgacatctacctcccgacctaccaccccactggctggttccagaacgtctctcacctagaccttgcctcccctcctctcctgcccagctctgaccctgatgcttaataaacgcagcgacgtgagggtcctgattctccctggttttaccccagctccatccttgcatcactggggaggacgtgatgagtgaggacttgggtcctcggtcttacccccaccactaagagaatacaggaaaatcccttctaggcatctcctctccccaacccttccacacgtttgatttcttcctgcagaggcccagccacgtgtctggaatcccagctccgctgcttactgtcggtgtccccttgggatgtacctttcttcactgcagatttctcacctgtaagatgaagataaggatgatacagtctccatcaggcagtggctgttggaaagatttaagatttcacacctatgacatacatgggatagcacctgggccgccatgcactcaataaagaatgtatttt

SEQ ID NO: 169 - protein, 244 aa, Homo sapiens
MKKLMVVLSLIAAAWAEEQNKLVHGGPCDKTSHPYQAALYTSGHLLCGGVLIHPLWVLTAAHCKKPNLQVFLGKHNLRQRESSQEQSSVVRAVIHPDYDAASHDQDIMLLRLARPAKLSELIQPLPLERDCSANTTSCHILGWGKTADGDFPDTIQCAYIHLVSREECEHAYPGQITQNMLCAGDEKYGKDSCQGDSGGPLVCGDHLRGLVSWGNIPCGSKEKPGVYTNVCRYTNWIQKTIQAK

SEQ ID NO: 170 - DNA, 1641 bp, Homo sapiens
agcgagtgcgcgctcctcctcgcccgccgctaggtccatcccggcccagccaccatgtccatccacttcagctccccggtattcacctcgcgctcagccgccttctcgggccgcggcgcccaggtgcgcctgagctccgctcgccccggcggccttggcagcagcagcctctacggcctcggcgcctcgcggccgcgcgtggccgtgcgctctgcctatgggggcccggtgggcgccggcatccgcgaggtcaccattaaccagagcctgctggccccgctgcggctggacgccgacccctccctccagcgggtgcgccaggaggagagcgagcagatcaagaccctcaacaacaagtttgcctccttcatcgacaaggtgcggtttctggagcagcagaacaagctgctggagaccaagtggacgctgctgcaggagcagaagtcggccaagagcagccgcctcccagacatctttgaggcccagattgctggccttcggggtcagcttgaggcactgcaggtggatgggggccgcctggaggcggagctgcggagcatgcaggatgtggtggaggacttcaagaataagtacgaagatgaaattaaccgccgcacagctgctgagaatgagtttgtggtgctgaagaaggatgtggatgctgcctacacgagcaaggtggagctggaggccaaggtggatgccctgaatgatgagatcaacttcctcaggaccctcaatgagacggagttgacagagctgcagtcccagatctccgacacatctgtggtgctgtccatggacaacagtcgctccctggacctggacggcatcatcgctgaggtcaaggcacagtatgaggagatggccaaatgcagccgggctgaggctgaagcctggtaccagaccaagtttgagaccctccaggcccaggctgggaagcatggggacgacctccggaatacccggaatgagatttcagagatgaaccgggccatccagaggctgcaggctgagatcgacaacatcaagaaccagcgtgccaagttggaggccgccattgccgaggctgaggagcgtggggagctggcgctcaaggatgctcgtgccaagcaggaggagctggaagccgccctgcagcgggccaagcaggatatggcacggcagctgcgtgagtaccaggaactcatgagcgtgaagctggccctggacatcgagatcgccacctaccgcaagctgctggagggcgaggagagccggttggctggagatggagtgggagccgtgaatatctctgtgatgaattccactggtggcagtagcagtggcggtggcattgggctgaccctcgggggaaccatgggcagcaatgccctgagcttctccagcagtgcgggtcctgggctcctgaaggcttattccatccggaccgcatccgccagtcgcaggagtgcccgcgactgagccgcctcccaccactccactcctccagccaccacccacaatcacaagaagattcccacccctgcctcccatgcctggtcccaagacagtgagacagtctggaaagtgatgtcagaatagcttccaataaagcagcctcattctgaggcctgagtgatccaaaaaaaaaaaaaaaaa

SEQ ID NO: 171 - protein, 469 aa, Homo sapiens
MSIHFSSPVFTSRSAAFSGRGAQVRLSSARPGGLGSSSLYGLGASRPRVAVRSAYGGPVGAGIREVTINQSLLAPLRLDADPSLQRVRQEESEQIKALNNKFASFIDKVRFLEQQNKLLETKWTLLQEQKSAKSSRLPDIFEAQIAGLRGQLEALQVDGGRLEQGLRTMQDVVEDFKNKYEDEINRRTAAENEFVVLKKDVDAAYMSKVELEAKVDALNDEINFLRTLNETELTELQSQISDTSVVLSMDNSRSLDLDGIIAEVKAQYEEMAKCSRAEAEAWYQTKFETLQAQAGKHGDDLRNTRNEISEMNRAIQRLQAEIDNIKNQRAKLEAAIAEAEECGELALKDARAKQEELEAALQRAKQDMARQLREYQELMSVKLALDIEIATYRKLLEGEESRLAGDGVGAVNISVMNSTGGSSSGGGIGLTLGGTMGSNALSFSSSAGPGLLKAYSIRTASASRRSARD

SEQ ID NO: 172 - DNA, 1640 bp, Homo sapiens
gcgagtgcgcgctcctcctcgcccgccgctaggtccatcccggcccagccaccatgtccatccacttcagctccccggtattcacctcgcgctcagccgccttctcgggccgcggcgcccaggtgcgcctgagctccgctcgccccggcggccttggcagcagcagcctctacggcctcggcgcctcgcggccgcgcgtggccgtgcgctctgcctatgggggcccggtgggcgccggcatccgcgaggtcaccattaaccagagcctgctggccccgctgcggctggacgccgacccctccctccagcgggtgcgccaggaggagagcgagcagatcaagaccctcaacaacaagtttgcctccttcatcgacaaggtgcggtttctggagcagcagaacaagctgctggagaccaagtggacgctgctgcaggagcagaagtcggccaagagcagccgcctcccagacatctttgaggcccagattgctggccttcggggtcagcttgaggcactgcaggtggatgggggccgcctggaggcggagctgcggagcatgcaggatgtggtggaggacttcaagaataagtacgaagatgaaattaaccgccgcacagctgctgagaatgagtttgtggtgctgaagaaggatgtggatgctgcctacatgagcaaggtggagctggaggccaaggtggatgccctgaatgatgagatcaacttcctcaggaccctcaatgagacggagttgacagagctgcagtcccagatctccgacacatctgtggtgctgtccatggacaacagtcgctccctggacctggacggcatcatcgctgaggtcaaggcacagtatgaggagatggccaaatgcagccgggctgaggctgaagcctggtaccagaccaagtttgagaccctccaggcccaggctgggaagcatggggacgacctccggaatacccggaatgagatttcagagatgaaccgggccatccagaggctgcaggctgagatcgacaacatcaagaaccagcgtgccaagttggaggccgccattgccgaggctgaggagcgtggggagctggcgctcaaggatgctcgtgccaagcaggaggagctggaagccgccctgcagcgggccaagcaggatatggcacggcagctgcgtgagtaccaggaactcatgagcgtgaagctggccctggacatcgagatcgccacctaccgcaagctgctggagggcgaggagagccggttggctggagatggagtgggagccgtgaatatctctgtgatgaattccactggtggcagtagcagtggcggtggcattgggctgaccctcgggggaaccatgggcagcaatgccctgagcttctccagcagtgcgggtcctgggctcctgaaggcttattccatccggaccgcatccgccagtcgcaggagtgcccgcgactgagccgcctcccaccactccactcctccagccaccacccacaatcacaagaagattcccacccctgcctcccatgcctggtcccaagacagtgagacagtctggaaagtgatgtcagaatagcttccaataaagcagcctcattctgaggcctgagtgatccaaaaaaaaaaaaaaaaa

SEQ ID NO: 173 - protein, 469 aa, Homo sapiens
MSIHFSSPVFTSRSAAFSGRGAQVRLSSARPGGLGSSSLYGLGASRPRVAVRSAYGGPVGAGIREVTINQSLLAPLRLDADPSLQRVRQEESEQIKTLNNKFASFIDKVRFLEQQNKLLETKWTLLQEQKSAKSSRLPDIFEAQIAGLRGQLEALQVDGGRLEAELRSMQDVVEDFKNKYEDEINRRTAAENEFVVLKKDVDAAYMSKVELEAKVDALNDEINFLRTLNETELTELQSQISDTSVVLSMDNSRSLDLDGIIAEVKAQYEEMAKCSRAEAEAWYQTKFETLQAQAGKHGDDLRNTRNEISEMNRAIQRLQAEIDNIKNQRAKLEAAIAEAEERGELALKDARAKQEELEAALQRAKQDMARQLREYQELMSVKLALDIEIATYRKLLEGEESRLAGDGVGAVNISVMNSTGGSSSGGGIGLTLGGTMGSNALSFSSSAGPGLLKAYSIRTASASRRSARD

SEQ ID NO: 174 - DNA, 2186 bp, Homo sapiens
acacggaccaaggagtctaacacgtgcgcgagtcgggggctcgcacgaaagccgccgtggcgcaatgaaggtgaaggccggcgcgctcgccggccgaggtgggatcccgaggcctctccagtccgccgagggcgcaccaccggcccgtctcgcccgccgcgccggggaggtggagcacgagcgcacgtgttaggacccgaaagatggtgaactatgcctgggcagggcgaagccagaggaaactctggtggaggtccgtagcggtcctgacgtgcaaatcggtcgtccgacctgggtataggggcgggctccaggcgaggcggtcgacgctcctgaaaacttgcgcgcgcgctcgcgccactgcgcccggagcgatgaagatggtcgcgccctggacgcggttctactccaacagctgctgcttgtgctgccatgtccgcaccggcaccatcctgctcggcgtctggtatctgatcatcaatgctgtggtactgttgattttattgagtgccctggctgatccggatcagtataacttttcaagttctgaactgggaggtgactttgagttcatggatgatgccaacatgtgcattgccattgcgatttctcttctcatgatcctgatatgtgctatggctacttacggagcgtacaagcaacgcgcagcctggatcatcccattcttctgttaccagatctttgactttgccctgaacatgttggttgcaatcactgtgcttatttatccaaactccattcaggaatacatacggcaactgcctcctaattttccctacagagatgatgtcatgtcagtgaatcctacctgtttggtccttattattcttctgtttattagcattatcttgacttttaagggttacttgattagctgtgtttggaactgctaccgatacatcaatggtaggaactcctctgatgtcctggtttatgttaccagcaatgacactacggtgctgctacccccgtatgatgatgccactgtgaatggtgctgccaaggagccaccgccaccttacgtgtctgcctaagccttcaagtgggcggagctgagggcagcagcttgactttgcagacatctgagcaatagttctgttatttcacttttgccatgagcctctctgagcttgtttgttgctgaaatgctactttttaaaatttagatgttagattgaaaactgtagttttcaacatatgctttgctagaacactgtgatagattaactgtagaattcttcctgtacgattggggatataatgggcttcactaaccttccctaggcattgaaacttcccccaaatctgatggacctagaagtctgcttttgtacctgctgggccccaaagttgggcatttttctctctgttccctctcttttgaaaatgtaaaataaaaccaaaaatagacaactttttcttcagccattccagcatagagaacaaaaccttatggaaacaggaatgtcaattgtgtaatcattgttctaattaggtaaatagaagtccttatgtatgtgttacaagaatttcccccacaacatcctttatgactgaagttcaatgacagtttgtgtttgggtggtaaaggattttctccatggcctgaattaagaccattagaaagcaccaggccgtgggagcagtgaccatctgctgactgttcttgtggatcttgtgtccagggacatggggtgacatgcctcgtatgtgttagagggtggaatggatgtgtttggcgctgcatgggatctggtgcccctcttctcctggattcacatccccacccagggcccgcttttactaagtgttctgccctagattggttcaaggaggtcatccaactgactttatcaagtggaattgggatatatttgatatacttctgcctaacaacatggaaaagggttttcttttccctgcaagctacatcctactgctttgaacttccaagtatgtctagtcaccttttaaaatgtaaacattttcagaaaaatgaggattgccttccttgtatgcgctttttaccttgactacctgaattgcaagggatttttatatattcatatgttacaaagtcagcaactctcctgttggttcattattgaatgtgctgtaaattaagttgtttgcaattaaaacaaggtttgcccacaaaaaaaaaa

SEQ ID NO: 175 - protein, 283 aa, Homo sapiens
MVNYAWAGRSQRKLWWRSVAVLTCKSVVRPGYRGGLQARRSTLLKTCARARATAPGAMKMVAPWTRFYSNSCCLCCHVRTGTILLGVWYLIINAVVLLILLSALADPDQYNFSSSELGGDFEFMDDANMCIAIAISLLMILICAMATYGAYKQRAAWIIPFFCYQIFDFALNMLVAITVLIYPNSIQEYIRQLPPNFPYRDDVMSVNPTCLVLIILLFISIILTFKGYLISCVWNCYRYINGRNSSDVLVYVTSNDTTVLLPPYDDATVNGAAKEPPPPYVSA

SEQ ID NO: 176 - DNA, 597 bp, Homo sapiens
atgcccctaggtctcctgtggctgggcctagccctgttgggggctctgcatgcccaggcccaggactccacctcagacctgatcccagccccacctctgagcaaggtccctctgcagcagaacttccaggacaaccaattccaggggaagtggtatgtggtaggcctggcagggaatgcaattctcagagaagacaaagacccgcaaaagatgtatgccaccatctatgagctgaaagaagacaagagctacaatgtcacctccgtcctgtttaggaaaaagaagtgtgactactggatcaggacttttgttccaggttgccagcccggcgagttcacgctgggcaacattaagagttaccctggattaacgagttacctcgtccgagtggtgagcaccaactacaaccagcatgctatggtgttcttcaagaaagtttctcaaaacagggagtacttcaagatcaccctctacgggagaaccaaggagctgacttcggaactaaaggagaacttcatccgcttctccaaatatctgggcctccctgaaaaccacatcgtcttccctgtcccaatcgaccagtgtatcgacggctga

SEQ ID NO: 177 - protein, 198 aa, Homo sapiens
MPLGLLWLGLALLGALHAQAQDSTSDLIPAPPLSKVPLQQNFQDNQFQGKWYVVGLAGNAILREDKDPQKMYATIYELKEDKSYNVTSVLFRKKKCDYWIRTFVPGCQPGEFTLGNIKSYPGLTSYLVRVVSTNYNQHAMVFFKKVSQNREYFKITLYGRTKELTSELKENFIRFSKYLGLPENHIVFPVPIDQCIDG

SEQ ID NO: 178 - DNA, 1518 bp, Homo sapiens
gcctgagaccctcctgcagccttctcaagggacagccccactctgcctcttgctcctccagggcagcaccatgcagcccctgtggctctgctgggcactctgggtgttgcccctggccagccccggggccgccctgaccggggagcagctcctgggcagcctgctgcggcagctgcagctcaaagaggtgcccaccctggacagggccgacatggaggagctggtcatccccacccacgtgagggcccagtacgtggccctgctgcagcgcagccacggggaccgctcccgcggaaagaggttcagccagagcttccgagaggtggccggcaggttcctggcgttggaggccagcacacacctgctggtgttcggcatggagcagcggctgccgcccaacagcgagctggtgcaggccgtgctgcggctcttccaggagccggtccccaaggccgcgctgcacaggcacgggcggctgtccccgcgcagcgcccgggcccgggtgaccgtcgagtggctgcgcgtccgcgacgacggctccaaccgcacctccctcatcgactccaggctggtgtccgtccacgagagcggctggaaggccttcgacgtgaccgaggccgtgaacttctggcagcagctgagccggccccggcagccgctgctgctacaggtgtcggtgcagagggagcatctgggcccgctggcgtccggcgcccacaagctggtccgctttgcctcgcagggggcgccagccgggcttggggagccccagctggagctgcacaccctggaccttggggactatggagctcagggcgactgtgaccctgaagcaccaatgaccgagggcacccgctgctgccgccaggagatgtacattgacctgcaggggatgaagtgggccgagaactgggtgctggagcccccgggcttcctggcttatgagtgtgtgggcacctgccggcagcccccggaggccctggccttcaagtggccgtttctggggcctcgacagtgcatcgcctcggagactgactcgctgcccatgatcgtcagcatcaaggagggaggcaggaccaggccccaggtggtcagcctgcccaacatgagggtgcagaagtgcagctgtgcctcggatggtgcgctcgtgccaaggaggctccagccataggcgcctagtgtagccatcgagggacttgacttgtgtgtgtttctgaagtgttcgagggtaccaggagagctggcgatgactgaactgctgatggacaaatgctctgtgctctctagtgagccctgaatttgcttcctctgacaagttacctcacctaatttttgcttctcaggaatgagaatctttggccactggagagcccttgctcagttttctctattcttattattcactgcactatattctaagcacttacatgtggagatactgtaacctgagggcagaaagcccaatgtgtcattgtttacttgtcctgtcactggatctgggctaaagtcctccaccac

SEQ ID NO: 179 - protein, 366 aa, Homo sapiens
MQPLWLCWALWVLPLASPGAALTGEQLLGSLLRQLQLKEVPTLDRADMEELVIPTHVRAQYVALLQRSHGDRSRGKRFSQSFREVAGRFLALEASTHLLVFGMEQRLPPNSELVQAVLRLFQEPVPKAALHRHGRLSPRSARARVTVEWLRVRDDGSNRTSLIDSRLVSVHESGWKAFDVTEAVNFWQQLSRPRQPLLLQVSVQREHLGPLASGAHKLVRFASQGAPAGLGEPQLELHTLDLGDYGAQGDCDPEAPMTEGTRCCRQEMYIDLQGMKWAENWVLEPPGFLAYECVGTCRQPPEALAFKWPFLGPRQCIASETDSLPMIVSIKEGGRTRPQVVSLPNMRVQKCSCASDGALVPRRLQP

SEQ ID NO: 180 - DNA, 444 bp, Homo sapiens
aattctagaagtccaaatcactcattgtttgtgaaagctgagctcacagcaaaacaagccaccatgaagctgtcggtgtgtctcctgctggtcacgctggccctctgctgctaccaggccaatgccgagttctgcccagctcttgtttctgagctgttagacttcttcttcattagtgaacctctgttcaagttaagtcttgccaaatttgatgcccctccggaagctgttgcagccaagttaggagtgaagagatgcacggatcagatgtcccttcagaaacgaagcctcattgcggaagtcctggtgaaaatattgaagaaatgtagtgtgtgacatgtaaaaactttcatcctggtttccactgtctttcaatgacaccctgatcttcactgcagaatgtaaaggtttcaacgtcttgctttaataaatcacttgctctac

SEQ ID NO: 181 - protein, 90 aa, Homo sapiens
MKLSVCLLLVTLALCCYQANAEFCPALVSELLDFFFISEPLFKLSLAKFDAPPEAVAAKLGVKRCTDQMSLQKRSLIAEVLVKILKKCSV

SEQ ID NO: 182 - DNA, 754 bp, Homo sapiens
ggagtatgagatgaaacgaatggcagagaatgagctgagccggtcagtaaatgagtttctgtccaagctgcaagatgacctcaaggaggcaatgaatactatgatgtgtagccgatgccaaggaaagcataggaggtttgaaatggaccgggaacctaagagtgccagatactgtgctgagtgtaataggctgcatcctgctgaggaaggagacttttgggcagagtcaagcatgttgggcctcaagatcacctactttgcactgatggatggaaaggtgtatgacatcacagagtgggctggatgccagcgtgtaggtatctccccagatacccacagagtcccctatcacatctcatttggttctcggattccaggcaccagagggcggcagagagccaccccagatgcccctcctgctgatcttcaggatttcttgagtcggatctttcaagtacccccagggcagatgccaatgggaacttctttgcagctcctcagcctgcccctggagccgctgcagcctctaagcccaacagcacagtacccaagggagaagccaaacctaagcggcggaagaaagtgaggaggcccttccaacgttgatgccccttctctttcctcaaatcaatgtcagggagtcaaaagggctgtagcacaggatggagtttgatttatccctcctcccccaacacctaggaactgaatctttttctttttattttttgagatggagtcttgctctgttgcccag

SEQ ID NO: 183 - protein, 191 aa, Homo sapiens
MKRMAENELSRSVNEFLSKLQDDLKEAMNTMMCSRCQGKHRRFEMDREPKSARYCAECNRLHPAEEGDFWAESSMLGLKITYFALMDGKVYDITEWAGCQRVGISPDTHRVPYHISFGSRIPGTRGRQRATPDAPPADLQDFLSRIFQVPPGQMPMGTSLQLLSLPLEPLQPLSPTAQYPREKPNLSGGRK

SEQ ID NO: 184 - DNA, 2511 bp, Homo sapiens
cttttcacactggccttaaagaggatatattagaagttgaagtaggaagggagccagagaggccgatggcgcaaaggtacgacgatctaccccattacgggggcatggatggagtaggcatcccctccacgatgtatggggacccgcatgcagccaggtccatgcagccggtccaccacctgaaccacgggcctcctctgcactcgcatcagtacccgcacacagctcataccaacgccatggcccccagcatgggctcctctgtcaatgacgctttaaagagagataaagatgccatttatggacaccccctcttccctctcttagcactgatttttgagaaatgtgaattagctacttgtaccccccgcgagccgggggtggcgggcggggacgtctgctcgtcagagtcattcaatgaagatatagccgtgttcgccaaacagattcgcgcagaaaaacctctattttcttctaatccagaactggataacttgatgattcaagccatacaagtattaaggtttcatctattggaattagagaaggtacacgaattatgtgacaatttctgccaccggtatattagctgtttgaaagggaaaatgcctatcgatttggtgatagacgatagagaaggaggatcaaaatcagacagtgaagatataacaagatcagcaaatctaactgaccagccctcttggaacagagatcatgatgacacggcatctactcgttcaggaggaaccccaggcccttccagcggtggccacacgtcacacagtggggacaacagcagtgagcaaggtgatggcttggacaacagtgtagcttcccccagcacaggtgacgatgatgaccctgataaggacaaaaagcgtcacaaaaagcgtggcatctttcccaaagtagccacaaatatcatgagggcgtggctgttccagcatctaacacacccttacccttctgaagaacagaaaaagcagttggcacaagacacgggactcaccatccttcaagtgaacaattggtttattaatgcccggagaagaatagtgcagcccatgatagaccagtccaaccgagcagtaagtcaaggaacaccttataatcctgatggacagcccatgggaggtttcgtaatggacggtcagcaacatatgggaattagagcaccaggacctatgagtggaatgggcatgaatatgggcatggaggggcagtggcactacatgtaaccttcatctagttaaccaatcgcaaagcaagggggaaggctgcaaagtatgccaggggagtatgtagcccggggtggtccaatgggtgtgagtatgggacagccaagttatacccaaccccagatgcccccccatcctgctcagctgcgtcatgggccccccatgcatacgtacattcctggacaccctcaccacccaacagtgatgatgcatggaggaccgccccaccctggaatgccaatgtcagcatcaagccccacagttcttaatacaggagacccaacaatgagtggacaagtcatggacattcatgctcagtagcttaagggaatatgcattgtctgcaatggtgactgatttcaaatcatgttttttctgcaatgactgtggagttccattcttggcatctactctggaccaaggagcatccctaattcttcatagggacctttaaaaagcaggaaataccaactgaagtcaatttgggggacatgctaaataactatataagacattaagagaacaaagagtgaaatattgtaaatgctattatactgttatccatattacgttgtttcttatagattttttaaaaaaaatgtgaaatttttccacactatgtgtgttgtttccatagctcttcacttcctccagaagcctccttacattaaaaagccttacagttatcctgcaagggacaggaaggtctgatttgcaggatttttagagcattaaaataactatcaggcagaagaatctttcttctcgcctaggatttcagccatgcgcgcgctctctctctttctctctcttttcctctctctccctctttctagcctggggcttgaatttgcatgtctaattcatttactcaccatatttgaattggcctgaacagatgtaaatcgggaaggatgggaaaaactgcagtcatcaacaatgattaatcagctgttgcaggcagtgtcttaaggagactggtaggaggaggcatggaaaccaaaaggccgtgtgtttagaagcctaattgtcacatcaagcatcattgtccccatgcaacaaccaccaccttatacatcacttcctgttttaagcagctctaaaacatagactgaagatttatttttaatatgttgactttatttctgagcaaagcatcggtcatgtgtgtattttttcatagtcccaccttggagcatttatgtagacattgtaaataaattttgtgcaaaaaggactggaaaaatgaactgtattattgcaattttttttt

SEQ ID NO: 185 - protein, 390 aa, Homo sapiens
MAQRYDDLPHYGGMDGVGIPSTMYGDPHAARSMQPVHHLNHGPPLHSHQYPHTAHTNAMAPSMGSSVNDALKRDKDAIYGHPLFPLLALIFEKCELATCTPREPGVAGGDVCSSESFNEDIAVFAKQIRAEKPLFSSNPELDNLMIQAIQVLRFHLLELEKVHELCDNFCHRYISCLKGKMPIDLVIDDREGGSKSDSEDITRSANLTDQPSWNRDHDDTASTRSGGTPGPSSGGHTSHSGDNSSEQGDGLDNSVASPSTGDDDDPDKDKKRHKKRGIFPKVATNIMRAWLFQHLTHPYPSEEQKKQLAQDTGLTILQVNNWFINARRRIVQPMIDQSNRAVSQGTPYNPDGQPMGGFVMDGQQHMGIRAPGPMSGMGMNMGMEGQWHYM

SEQ ID NO: 186 - DNA, 517 bp, Homo sapiens
cctccacagcaacttccttgatccctgccacgcacgactgaacacagacagcagccgcctcgccatgaagctgctgatggtcctcatgctggcggccctcctcctgcactgctatgcagattctggctgcaaactcctggaggacatggttgaaaagaccatcaattccgacatatctatacctgaatacaaagagcttcttcaagagttcatagacagtgatgccgctgcagaggctatggggaaattcaagcagtgtttcctcaaccagtcacatagaactctgaaaaactttggactgatgatgcatacagtgtacgacagcatttggtgtaatatgaagagtaattaactttacccaaggcgtttggctcagagggctacagactatggccagaactcatctgttgattgctagaaaccacttttctttcttgtgttgtctttttatgtggaaactgctagacaactgttgaaacctcaaattcatttccatttcaataactaactgcaaatc

SEQ ID NO: 187 - protein, 95 aa, Homo sapiens
MKLLMVLMLAALLLHCYADSGCKLLEDMVEKTINSDISIPEYKELLQEFIDSDAAAEAMGKFKQCFLNQSHRTLKNFGLMMHTVYDSIWCNMKSN

SEQ ID NO: 188 - DNA, 2048 bp, Homo sapiens
ctctgcaacagccgcgcttcccgggtcccgcggctcccgcgcgcgatctgccgcggccggctgctgggcaaaaatcagagccgcctccgccccattacccatcatggaaaccctccaggaaaaagtggccccggacgcgcgagcctgaggattctgcacaaaagaggtgcccaaaatgaagaccctgatgcgccatggtctggcagtgtgtttagcgctcaccaccatgtgcaccagcttgttgctagtgtacagcagcctcggcggccagaaggagcggcccccgcagcagcagcagcagcagcagcaacagcagcagcaggcgtcggccaccggcagctcgcagccggcggcggagagcagcacccagcagcgccccggggtccccgcgggaccgcggccactggacggatacctcggagtggcggaccacaagcccctgaaaatgcactgcagggactgtgccctggtgaccagctcagggcatctgctgcacagtcggcaaggctcccagattgaccagacagagtgtgtcatccgcatgaatgacgcccccacacgcggctatgggcgtgacgtgggcaatcgcaccagcctgagggtcatcgcgcattccagcatccagaggatcctccgcaaccgccatgacctgctcaacgtgagccagggcaccgtgttcatcttctggggccccagcagctacatgcggcgggacggcaagggccaggtctacaacaacctgcatctcctgagccaggtgctgccccggctgaaggccttcatgattactcgccacaagatgctgcagtttgatgagctcttcaagcaggagactggcaaagacaggaagatatccaacacttggctcagcactggctggtttacaatgacaattgcactggagctctgtgacaggatcaatgtttatggcatggtgcccccagacttctgcagggatcccaatcacccttcagtaccttatcattattatgaaccttttggacctgatgaatgtacaatgtacctctcccatgagcgaggacgcaagggcagtcatcaccgctttatcacagagaaacgagtctttaagaactgggcacggacattcaatattcacttttttcaaccagactggaaaccagaatcacttgctataaatcatcctgagaataaacctgtgttctaaggaatgagcatgccagactgtaatcccaggtattcactgcatcagacaccgagacactgaacttcctgagccaccagacaggaaagggtagcagaaaacagcttcactcctcaggaagtaccatggacagacgcctaccaggggtgacaaagcagtgcagttggattgtaaggaaaaattccggaattaatgcatcctaatgaatgttgtccccttcaatggtgttaccttaggagctgaacattcaattcagttacaccactatgactaaaaacagtttggatctcttagtattgcctttgaaactgcaacataagcaactcaacaatattagttgcattcctttatagacataccatgtcaaagacgtttttctatcaagttgtattctttcctgttctataacctttgtcatctgttagactctgtatgtgtgatttgtaaaaagcaggctgaaactatggacatgatttctgaagagcacatctccactgactttcataaagcaaatgtccaatatttatttattgagagttttttagtgcaatctgggccagtatttttatagattatgattatgtggtaatttatccttcctaactctttaatcctgaatgatggttggaaatggcctagaattaggttactctgttcacaatgctcattgttagcatgcaattggtatttgacttggaagtgttgtgttgtattttttgaacccctaggcttcaggaaaactgctcttttgtaaaaagaatagcgatgacattttctaatgtgcagaaatgttccaaaaggacaaaattgaaaaccaaaaactatgttattaaaacaaaaaaatgctaaaaaaaaaaaaaaaaaa

SEQ ID NO: 189 - protein, 336 aa, Homo sapiens
MKTLMRHGLAVCLALTTMCTSLLLVYSSLGGQKERPPQQQQQQQQQQQQASATGSSQPAAESSTQQRPGVPAGPRPLDGYLGVADHKPLKMHCRDCALVTSSGHLLHSRQGSQIDQTECVIRMNDAPTRGYGRDVGNRTSLRVIAHSSIQRILRNRHDLLNVSQGTVFIFWGPSSYMRRDGKGQVYNNLHLLSQVLPRLKAFMITRHKMLQFDELFKQETGKDRKISNTWLSTGWFTMTIALELCDRINVYGMVPPDFCRDPNHPSVPYHYYEPFGPDECTMYLSHERGRKGSHHRFITEKRVFKNWARTFNIHFFQPDWKPESLAINHPENKPVF

SEQ ID NO: 190 - DNA, 1078 bp, Homo sapiens
aagaacaattgtctctggacggcagctatgcgactcaccgtgctgtgtgctgtgtgcctgctgcctggcagcctggccctgccgctgcctcaggaggcgggaggcatgagtgagctacagtgggaacaggctcaggactatctcaagagattttatctctatgactcagaaacaaaaaatgccaacagtttagaagccaaactcaaggagatgcaaaaattctttggcctacctataactggaatgttaaactcccgcgtcatagaaataatgcagaagcccagatgtggagtgccagatgttgcagaatactcactatttccaaatagcccaaaatggacttccaaagtggtcacctacaggatcgtatcatatactcgagacttaccgcatattacagtggatcgattagtgtcaaaggctttaaacatgtggggcaaagagatccccctgcatttcaggaaagttgtatggggaactgctgacatcatgattggctttgcgcgaggagctcatggggactcctacccatttgatgggccaggaaacacgctggctcatgcctttgcgcctgggacaggtctcggaggagatgctcacttcgatgaggatgaacgctggacggatggtagcagtctagggattaacttcctgtatgctgcaactcatgaacttggccattctttgggtatgggacattcctctgatcctaatgcagtgatgtatccaacctatggaaatggagatccccaaaattttaaactttcccaggatgatattaaaggcattcagaaactatatggaaagagaagtaattcaagaaagaaatagaaacttcaggcagaacatccattcattcattcattggattgtatatcattgttgcacaatcagaattgataagcactgttcctccactccatttagcaattatgtcacccttttttattgcagttggtttttgaatgtctttcactccttttattggttaaactcctttatggtgtgactgtgtcttattccatctatgagctttgtcagtgcgcgtagatgtcaataaatgttacatacacaaata

SEQ ID NO: 191 - protein, 267 aa, Homo sapiens
MRLTVLCAVCLLPGSLALPLPQEAGGMSELQWEQAQDYLKRFYLYDSETKNANSLEAKLKEMQKFFGLPITGMLNSRVIEIMQKPRCGVPDVAEYSLFPNSPKWTSKVVTYRIVSYTRDLPHITVDRLVSKALNMWGKEIPLHFRKVVWGTADIMIGFARGAHGDSYPFDGPGNTLAHAFAPGTGLGGDAHFDEDERWTDGSSLGINFLYAATHELGHSLGMGHSSDPNAVMYPTYGNGDPQNFKLSQDDIKGIQKLYGKRSNSRKK

SEQ ID NO: 192 - DNA, 2217 bp, Homo sapiens
ggccggccactcccgtctgctgtgacgcgcggacagagagctaccggtggacccacggtgcctccctccctgggatctacacagaccatggccttgccaacggctcgacccctgttggggtcctgtgggacccccgccctcggcagcctcctgttcctgctcttcagcctcggatgggtgcagccctcgaggaccctggctggagagacagggcaggaggctgcacccctggacggagtcctggccaacccacctaacatttccagcctctcccctcgccaactccttggcttcccgtgtgcggaggtgtccggcctgagcacggagcgtgtccgggagctggctgtggccttggcacagaagaatgtcaagctctcaacagagcagctgcgctgtctggctcaccggctctctgagccccccgaggacctggacgccctcccattggacctgctgctattcctcaacccagatgcgttctcggggccccaggcctgcacccgtttcttctcccgcatcacgaaggccaatgtggacctgctcccgaggggggctcccgagcgacagcggctgctgcctgcggctctggcctgctggggtgtgcgggggtctctgctgagcgaggctgatgtgcgggctctgggaggcctggcttgcgacctgcctgggcgctttgtggccgagtcggccgaagtgctgctaccccggctggtgagctgcccgggacccctggaccaggaccagcaggaggcagccagggcggctctgcagggcgggggacccccctacggccccccgtcgacatggtctgtctccacgatggacgctctgcggggcctgctgcccgtgctgggccagcccatcatccgcagcatcccgcagggcatcgtggccgcgtggcggcaacgctcctctcgggacccatcctggcggcagcctgaacggaccatcctccggccgcggttccggcgggaagtggagaagacagcctgtccttcaggcaagaaggcccgcgagatagacgagagcctcatcttctacaagaagtgggagctggaagcctgcgtggatgcggccctgctggccacccagatggaccgcgtgaacgccatccccttcacctacgagcagctggacgtcctaaagcataaactggatgagctctacccacaaggttaccccgagtctgtgatccagcacctgggctacctcttcctcaagatgagccctgaggacattcgcaagtggaatgtgacgtccctggagaccctgaaggctttgcttgaagtcaacaaagggcacgaaatgagtcctcaggctcctcggcggcccctcccacaggtggccaccctgatcgaccgctttgtgaagggaaggggccagctagacaaagacaccctagacaccctgaccgccttctaccctgggtacctgtgctccctcagccccgaggagctgagctccgtgccccccagcagcatctgggcggtcaggccccaggacctggacacgtgtgacccaaggcagctggacgtcctctatcccaaggcccgccttgctttccagaacatgaacgggtccgaatacttcgtgaagatccagtccttcctgggtggggcccccacggaggatttgaaggcgctcagtcagcagaatgtgagcatggacttggccacgttcatgaagctgcggacggatgcggtgctgccgttgactgtggctgaggtgcagaaacttctgggaccccacgtggagggcctgaaggcggaggagcggcaccgcccggtgcgggactggatcctacggcagcggcaggacgacctggacacgctggggctggggctacagggcggcatccccaacggctacctggtcctagacctcagcgtgcaaggtgggcggggcggccaggccagggctgggggcagagctgggggcgtggaggtgggcgctctgagtcacccctctctctgtagaggccctctcggggacgccctgcctcctaggacctggacctgttctcaccgtcctggcactgctcctagcctccaccctggcctgagggccccactcccttgctggccccagccctgctggggatccccgcctggccaggagcaggcacgggtgatccccgttccaccccaagagaactcgcgctcagtaaacgggaacatgccccctgcagacacgtaaaaaaaaaaaaaaaaaaaaaaa

SEQ ID NO: 193 - protein, 702 aa, Homo sapiens [sequence omitted]

SEQ ID NO: 194 - DNA, 2135 bp, Homo sapiens
ggccggccactcccgtctgctgtgacgcgcggacagagagctaccggtggacccacggtgcctccctccctgggatctacacagaccatggccttgccaacggctcgacccctgttggggtcctgtgggacccccgccctcggcagcctcctgttcctgctcttcagcctcggatgggtgcagccctcgaggaccctggctggagagacagggcaggaggctgcacccctggacggagtcctggccaacccacctaacatttccagcctctcccctcgccaactccttggcttcccgtgtgcggaggtgtccggcctgagcacggagcgtgtccgggagctggctgtggccttggcacagaagaatgtcaagctctcaacagagcagctgcgctgtctggctcaccggctctctgagccccccgaggacctggacgccctcccattggacctgctgctattcctcaacccagatgcgttctcggggccccaggcctgcacccgtttcttctcccgcatcacgaaggccaatgtggacctgctcccgaggggggctcccgagcgacagcggctgctgcctgcggctctggcctgctggggtgtgcgggggtctctgctgagcgaggctgatgtgcgggctctgggaggcctggcttgcgacctgcctgggcgctttgtggccgagtcggccgaagtgctgctaccccggctggtgagctgcccgggacccctggaccaggaccagcaggaggcagccagggcggctctgcagggcgggggacccccctacggccccccgtcgacatggtctgtctccacgatggacgctctgcggggcctgctgcccgtgctgggccagcccatcatccgcagcatcccgcagggcatcgtggccgcgtggcggcaacgctcctctcgggacccatcctggcggcagcctgaacggaccatcctccggccgcggttccggcgggaagtggagaagacagcctgtccttcaggcaagaaggcccgcgagatagacgagagcctcatcttctacaagaagtgggagctggaagcctgcgtggatgcggccctgctggccacccagatggaccgcgtgaacgccatccccttcacctacgagcagctggacgtcctaaagcataaactggatgagctctacccacaaggttaccccgagtctgtgatccagcacctgggctacctcttcctcaagatgagccctgaggacattcgcaagtggaatgtgacgtccctggagaccctgaaggctttgcttgaagtcaacaaagggcacgaaatgagtcctcaggctcctcggcggcccctcccacaggtggccaccctgatcgaccgctttgtgaagggaaggggccagctagacaaagacaccctagacaccctgaccgccttctaccctgggtacctgtgctccctcagccccgaggagctgagctccgtgccccccagcagcatctgggcggtcaggccccaggacctggacacgtgtgacccaaggcagctggacgtcctctatcccaaggcccgccttgctttccagaacatgaacgggtccgaatacttcgtgaagatccagtccttcctgggtggggcccccacggaggatttgaaggcgctcagtcagcagaatgtgagcatggacttggccacgttcatgaagctgcggacggatgcggtgctgccgttgactgtggctgaggtgcagaaacttctgggaccccacgtggagggcctgaaggcggaggagcggcaccgcccggtgcgggactggatcctacggcagcggcaggacgacctggacacgctggggctggggctacagggcggcatccccaacggctacctggtcctagacctcagcgtgcaagaggccctctcggggacgccctgcctcctaggacctggacctgttctcaccgtcctggcactgctcctagcctccaccctggcctgagggccccactcccttgctggccccagccctgctggggatccccgcctggccaggagcaggcacgggtgatccccgttccaccccaagagaactcgcgctcagtaaacgggaacatgccccctgcagacacgtaaaaaaaaaaaaaaaaaaaaaaa

SEQ ID NO: 195 - protein, 630 aa, Homo sapiens [sequence omitted]

SEQ ID NO: 196 - DNA, 2105 bp, Homo sapiens
ggccggccactcccgtctgctgtgacgcgcggacagagagctaccggtggacccacggtgcctccctccctgggatctacacagaccatggccttgccaacggctcgacccctgttggggtcctgtgggacccccgccctcggcagcctcctgttcctgctcttcagcctcggatgggtgcagccctcgaggaccctggctggagagacagggcaggaggctgcacccctggacggagtcctggccaacccacctaacatttccagcctctcccctcgccaactccttggcttcccgtgtgcggaggtgtccggcctgagcacggagcgtgtccgggagctggctgtggccttggcacagaagaatgtcaagctctcaacagagcagctgcgctgtctggctcaccggctctctgagccccccgaggacctggacgccctcccattggacctgctgctattcctcaacccagatgcgttctcggggccccaggcctgcacccgtttcttctcccgcatcacgaaggccaatgtggacctgctcccgaggggggctcccgagcgacagcggctgctgcctgcggctctggcctgctggggtgtgcgggggtctctgctgagcgaggctgatgtgcgggctctgggaggcctggcttgcgacctgcctgggcgctttgtggccgagtcggccgaagtgctgctaccccggctggtgagctgcccgggacccctggaccaggaccagcaggaggcagccagggcggctctgcagggcgggggacccccctacggccccccgtcgacatggtctgtctccacgatggacgctctgcggggcctgctgcccgtgctgggccagcccatcatccgcagcatcccgcagggcatcgtggccgcgtggcggcaacgctcctctcgggacccatcctggcggcagcctgaacggaccatcctccggccgcggttccggcgggaagtggagaagacagcctgtccttcaggcaagaaggcccgcgagatagacgagagcctcatcttctacaagaagtgggagctggaagcctgcgtggatgcggccctgctggccacccagatggaccgcgtgaacgccatccccttcacctacgagcagctggacgtcctaaagcataaactggatgagctctacccacaaggttaccccgagtctgtgatccagcacctgggctacctcttcctcaagatgagccctgaggacattcgcaagtggaatgtgacgtccctggagaccctgaaggctttgcttgaagtcaacaaagggcacgaaatgagtcctcaggctcctcggcggcccctcccacaggtggccaccctgatcgaccgctttgtgaagggaaggggccagctagacaaagacaccctagacaccctgaccgccttctaccctgggtacctgtgctccctcagccccgaggagctgagctccgtgccccccagcagcatctgggcggtcaggccccaggacctggacacgtgtgacccaaggcagctggacgtcctctatcccaaggcccgccttgctttccagaacatgaacgggtccgaatacttcgtgaagatccagtccttcctgggtggggcccccacggaggatttgaaggcgctcagtcagcagaatgtgagcatggacttggccacgttcatgaagctgcggacggatgcggtgctgccgttgactgtggctgaggtgcagaaacttctgggaccccacgtggagggcctgaaggcggaggagcggcaccgcccggtgcgggactggatcctacggcagcggcaggacgacctggacacgctggggctggggctacagggcggcatccccaacggctacctggtcctagacctcagcgtgcaaggacctggacctgttctcaccgtcctggcactgctcctagcctccaccctggcctgagggccccactcccttgctggccccagccctgctggggatccccgcctggccaggagcaggcacgggtgatccccgttccaccccaagagaactcgcgctcagtaaacgggaacatgccccctgcagacacgtaaaaaaaaaaaaaaaaaaaaaaa

SEQ ID NO: 197 - protein, 620 aa, Homo sapiens
MALPTARPLLGSCGTPALGSLLFLLFSLGWVQPSRTLAGETGQEAAPLDGVLANPPNISSLSPRQLLGFPCAEVSGLSTERVRELAVALAQKNVKLSTEQLRCLAHRLSEPPEDLDALPLDLLLFLNPDAFSGPQACTRFFSRITKANVDLLPRGAPERQRLLPAALACWGVRGSLLSEADVRALGGLACDLPGRFVAESAEVLLPRLVSCPGPLDQDQQEAARAALQGGGPPYGPPSTWSVSTMDALRGLLPVLGQPIIRSIPQGIVAAWRQRSSRDPSWRQPERTILRPRFRREVEKTACPSGKKAREIDESLIFYKKWELEACVDAALLATQMDRVNAIPFTYEQLDVLKHKLDELYPQGYPESVIQHLGYLFLKMSPEDIRKWNVTSLETLKALLEVNKGHEMSPQAPRRPLPQVATLIDRFVKGRGQLDKDTLDTLTAFYPGYLCSLSPEELSSVPPSSIWAVRPQDLDTCDPRQLDVLYPKARLAFQNMNGSEYFVKIQSFLGGAPTEDLKALSQQNVSMDLATFMKLRTDAVLPLTVAEVQKLLGPHVEGLKAEERHRPVRDWILRQRQDDLDTLGLGLQGGIPNGYLVLDLSVQGPGPVLTVLALLLASTLA

SEQ ID NO: 198 - DNA, 2193 bp, Homo sapiens
ggccggccactcccgtctgctgtgacgcgcggacagagagctaccggtggacccacggtgcctccctccctgggatctacacagaccatggccttgccaacggctcgacccctgttggggtcctgtgggacccccgccctcggcagcctcctgttcctgctcttcagcctcggatgggtgcagccctcgaggaccctggctggagagacagggcaggaggctgcacccctggacggagtcctggccaacccacctaacatttccagcctctcccctcgccaactccttggcttcccgtgtgcggaggtgtccggcctgagcacggagcgtgtccgggagctggctgtggccttggcacagaagaatgtcaagctctcaacagagcagctgcgctgtctggctcaccggctctctgagccccccgaggacctggacgccctcccattggacctgctgctattcctcaacccagatgcgttctcggggccccaggcctgcacccgtttcttctcccgcatcacgaaggccaatgtggacctgctcccgaggggggctcccgagcgacagcggctgctgcctgcggctctggcctgctggggtgtgcgggggtctctgctgagcgaggctgatgtgcgggctctgggaggcctggcttgcgacctgcctgggcgctttgtggccgagtcggccgaagtgctgctaccccggctggtgagctgcccgggacccctggaccaggaccagcaggaggcagccagggcggctctgcagggcgggggacccccctacggccccccgtcgacatggtctgtctccacgatggacgctctgcggggcctgctgcccgtgctgggccagcccatcatccgcagcatcccgcagggcatcgtggccgcgtggcggcaacgctcctctcgggacccatcctggcggcagcctgaacggaccatcctccggccgcggttccggcgggaagtggagaagacagcctgtccttcaggcaagaaggcccgcgagatagacgagagcctcatcttctacaagaagtgggagctggaagcctgcgtggatgcggccctgctggccacccagatggaccgcgtgaacgccatccccttcacctacgagcagctggacgtcctaaagcataaactggatgagctctacccacaaggttaccccgagtctgtgatccagcacctgggctacctcttcctcaagatgagccctgaggacattcgcaagtggaatgtgacgtccctggagaccctgaaggctttgcttgaagtcaacaaagggcacgaaatgagtcctcaggtggccaccctgatcgaccgctttgtgaagggaaggggccagctagacaaagacaccctagacaccctgaccgccttctaccctgggtacctgtgctccctcagccccgaggagctgagctccgtgccccccagcagcatctgggcggtcaggccccaggacctggacacgtgtgacccaaggcagctggacgtcctctatcccaaggcccgccttgctttccagaacatgaacgggtccgaatacttcgtgaagatccagtccttcctgggtggggcccccacggaggatttgaaggcgctcagtcagcagaatgtgagcatggacttggccacgttcatgaagctgcggacggatgcggtgctgccgttgactgtggctgaggtgcagaaacttctgggaccccacgtggagggcctgaaggcggaggagcggcaccgcccggtgcgggactggatcctacggcagcggcaggacgacctggacacgctggggctggggctacagggcggcatccccaacggctacctggtcctagacctcagcgtgcaaggtgggcggggcggccaggccagggctgggggcagagctgggggcgtggaggtgggcgctctgagtcacccctctctctgtagaggccctctcggggacgccctgcctcctaggacctggacctgttctcaccgtcctggcactgctcctagcctccaccctggcctgagggccccactcccttgctggccccagccctgctggggatccccgcctggccaggagcaggcacgggtgatccccgttccaccccaagagaactcgcgctcagtaaacgggaacatgccccctgcagacacgtaaaaaaaaaaaaaaaaaaaaaaa

SEQ ID NO: 199 - protein, 694 aa, Homo sapiens
MALPTARPLLGSCGTPALGSLLFLLFSLGWVQPSRTLAGETGQEAAPLDGVLANPPNISSLSPRQLLGFPCAEVSGLSTERVRELAVALAQKNVKLSTEQLRCLAHRLSEPPEDLDALPLDLLLFLNPDAFSGPQACTRFFSRITKANVDLLPRGAPERQRLLPAALACWGVRGSLLSEADVRALGGLACDLPGRFVAESAEVLLPRLVSCPGPLDQDQQEAARAALQGGGPPYGPPSTWSVSTMDALRGLLPVLGQPIIRSIPQGIVAAWRQRSSRDPSWRQPERTILRPRFRREVEKTACPSGKKAREIDESLIFYKKWELEACVDAALLATQMDRVNAIPFTYEQLDVLKHKLDELYPQGYPESVIQHLGYLFLKMSPEDIRKWNVTSLETLKALLEVNKGHEMSPQVATLIDRFVKGRGQLDKDTLDTLTAFYPGYLCSLSPEELSSVPPSSIWAVRPQDLDTCDPRQLDVLYPKARLAFQNMNGSEYFVKIQSFLGGAPTEDLKALSQQNVSMDLATFMKLRTDAVLPLTVAEVQKLLGPHVEGLKAEERHRPVRDWILRQRQDDLDTLGLGLQGGIPNGYLVLDLSVQGGRGGQARAGGRAGGVEVGALSHPSLCRGPLGDALPPRTWTCSHRPGTAPSLHPGLRAPLPCWPQPCWGSPPGQEQARVIPVPPQENSRSVNGNMPPADT

SEQ ID NO: 200 - DNA, 2081 bp, Homo sapiens
ggccggccactcccgtctgctgtgacgcgcggacagagagctaccggtggacccacggtgcctccctccctgggatctacacagaccatggccttgccaacggctcgacccctgttggggtcctgtgggacccccgccctcggcagcctcctgttcctgctcttcagcctcggatgggtgcagccctcgaggaccctggctggagagacagggcaggaggctgcacccctggacggagtcctggccaacccacctaacatttccagcctctcccctcgccaactccttggcttcccgtgtgcggaggtgtccggcctgagcacggagcgtgtccgggagctggctgtggccttggcacagaagaatgtcaagctctcaacagagcagctgcgctgtctggctcaccggctctctgagccccccgaggacctggacgccctcccattggacctgctgctattcctcaacccagatgcgttctcggggccccaggcctgcacccgtttcttctcccgcatcacgaaggccaatgtggacctgctcccgaggggggctcccgagcgacagcggctgctgcctgcggctctggcctgctggggtgtgcgggggtctctgctgagcgaggctgatgtgcgggctctgggaggcctggcttgcgacctgcctgggcgctttgtggccgagtcggccgaagtgctgctaccccggctggtgagctgcccgggacccctggaccaggaccagcaggaggcagccagggcggctctgcagggcgggggacccccctacggccccccgtcgacatggtctgtctccacgatggacgctctgcggggcctgctgcccgtgctgggccagcccatcatccgcagcatcccgcagggcatcgtggccgcgtggcggcaacgctcctctcgggacccatcctggcggcagcctgaacggaccatcctccggccgcggttccggcgggaagtggagaagacagcctgtccttcaggcaagaaggcccgcgagatagacgagagcctcatcttctacaagaagtgggagctggaagcctgcgtggatgcggccctgctggccacccagatggaccgcgtgaacgccatccccttcacctacgagcagctggacgtcctaaagcataaactggatgagctctacccacaaggttaccccgagtctgtgatccagcacctgggctacctcttcctcaagatgagccctgaggacattcgcaagtggaatgtgacgtccctggagaccctgaaggctttgcttgaagtcaacaaagggcacgaaatgagtcctcaggtggccaccctgatcgaccgctttgtgaagggaaggggccagctagacaaagacaccctagacaccctgaccgccttctaccctgggtacctgtgctccctcagccccgaggagctgagctccgtgccccccagcagcatctgggcggtcaggccccaggacctggacacgtgtgacccaaggcagctggacgtcctctatcccaaggcccgccttgctttccagaacatgaacgggtccgaatacttcgtgaagatccagtccttcctgggtggggcccccacggaggatttgaaggcgctcagtcagcagaatgtgagcatggacttggccacgttcatgaagctgcggacggatgcggtgctgccgttgactgtggctgaggtgcagaaacttctgggaccccacgtggagggcctgaaggcggaggagcggcaccgcccggtgcgggactggatcctacggcagcggcaggacgacctggacacgctggggctggggctacagggcggcatccccaacggctacctggtcctagacctcagcgtgcaaggacctggacctgttctcaccgtcctggcactgctcctagcctccaccctggcctgagggccccactcccttgctggccccagccctgctggggatccccgcctggccaggagcaggcacgggtgatccccgttccaccccaagagaactcgcgctcagtaaacgggaacatgccccctgcagacacgtaaaaaaaaaaaaaaaaaaaaaaa

SEQ ID NO: 201 - protein, 612 aa, Homo sapiens
MALPTARPLLGSCGTPALGSLLFLLFSLGWVQPSRTLAGETGQEAAPLDGVLANPPNISSLSPRQLLGFPCAEVSGLSTERVRELAVALAQKNVKLSTEQLRCLAHRLSEPPEDLDALPLDLLLFLNPDAFSGPQACTRFFSRITKANVDLLPRGAPERQRLLPAALACWGVRGSLLSEADVRALGGLACDLPGRFVAESAEVLLPRLVSCPGPLDQDQQEAARAALQGGGPPYGPPSTWSVSTMDALRGLLPVLGQPIIRSIPQGIVAAWRQRSSRDPSWRQPERTILRPRFRREVEKTACPSGKKAREIDESLIFYKKWELEACVDAALLATQMDRVNAIPFTYEQLDVLKHKLDELYPQGYPESVIQHLGYLFLKMSPEDIRKWNVTSLETLKALLEVNKGHEMSPQVATLIDRFVKGRGQLDKDTLDTLTAFYPGYLCSLSPEELSSVPPSSIWAVRPQDLDTCDPRQLDVLYPKARLAFQNMNGSEYFVKIQSFLGGAPTEDLKALSQQNVSMDLATFMKLRTDAVLPLTVAEVQKLLGPHVEGLKAEERHRPVRDWILRQRQDDLDTLGLGLQGGIPNGYLVLDLSVQGPGPVLTVLALLLASTLA

SEQ ID NO: 202 - DNA, 1195 bp, Homo sapiens
gtggagaagacagcctgtccttcaggcaagaaggcccgcgagatagacgagagcctcatcttctacaagaagtgggagctggaagcctgcgtggatgcggccctgctggccacccagatggaccgcgtgaacgccatccccttcacctacgagcagctggacgtcctaaagcataaactggatgagctctacccacaaggttaccccgagtctgtgatccagcacctgggctacctcttcctcaagatgagccctgaggacattcgcaagtggaatgtgacgtccctggagaccctgaaggctttgcttgaagtcaacaaagggcacgaaatgagtcctcaggtggccaccctgatcgaccgctttgtgaagggaaggggccagctagacaaagacaccctagacaccctgaccgccttctaccctgggtacctgtgctccctcagccccgaggagctgagctccgtgccccccagcagcatctgggcggtcaggccccaggacctggacacgtgtgacccaaggcagctggacgtcctctatcccaaggcccgccttgctttccagaacatgaacgggtccgaatacttcgtgaagatccagtccttcctgggtggggcccccacggaggatttgaaggcgctcagtcagcagaatgtgagcatggacttggccacgttcatgaagctgcggacggatgcggtgctgccgttgactgtggctgaggtgcagaaacttctgggaccccacgtggagggcctgaaggcggaggagcggcaccgcccggtgcgggactggatcctacggcagcggcaggacgacctggacacgctggggctggggctacagggcggcatccccaacggctacctggtcctagacctcagcgtgcaaggtgggcggggcggccaggccagggctgggggcagagctgggggcgtggaggtgggcgctctgagtcacccctctctctgtagaggccctctcggggacgccctgcctcctaggacctggacctgttctcaccgtcctggcactgctcctagcctccaccctggcctgagggccccactcccttgctggccccagccctgctggggatccccgcctggccaggagcaggcacgggtgatccccgttccaccccaagagaactcgcgctcagtaaacgggaacatgccccctgcagacacgt

SEQ ID NO: 203 - protein, 398 aa, Homo sapiens
VEKTACPSGKKAREIDESLIFYKKWELEACVDAALLATQMDRVNAIPFTYEQLDVLKHKLDELYPQGYPESVIQHLGYLFLKMSPEDIRKWNVTSLETLKALLEVNKGHEMSPQVATLIDRFVKGRGQLDKDTLDTLTAFYPGYLCSLSPEELSSVPPSSIWAVRPQDLDTCDPRQLDVLYPKARLAFQNMNGSEYFVKIQSFLGGAPTEDLKALSQQNVSMDLATFMKLRTDAVLPLTVAEVQKLLGPHVEGLKAEERHRPVRDWILRQRQDDLDTLGLGLQGGIPNGYLVLDLSVQGGRGGQARAGGRAGGVEVGALSHPSLCRGPLGDALPPRTWTCSHRPGTAPSLHPGLRAPLPCWPQPCWGSPPGQEQARVIPVPPQENSRSVNGNMPPADT

SEQ ID NO: 204 - DNA, 2085 bp, Homo sapiens
tggccactcccgtctgctgtgacgcgcggacagagagctaccggtggacccacggtgcctccctccctgggatctacacagaccatggccttgccaacggctcgacccctgttggggtcctgtgggacccccgccctcggcagcctcctgttcctgctcttcagcctcggatgggtgcagccctcgaggaccctggctggagagacagggcaggaggctgcacccctggacggagtcctggccaacccacctaacatttccagcctctcccctcgccaactccttggcttcccgtgtgcggaggtgtccggcctgagcacggagcgtgtccgggagctggctgtggccttggcacagaagaatgtcaagctctcaacagagcagctgcgctgtctggctcaccggctctctgagccccccgaggacctggacgccctcccattggacctgctgctattcctcaacccagatgcgttctcggggccccaggcctgcacccgtttcttctcccgcatcacgaaggccaatgtggacctgctcccgaggggggctcccgagcgacagcggctgctgcctgcggctctggcctgctggggtgtgcgggggtctctgctgagcgaggctgatgtgcgggctctgggaggcctggcttgcgacctgcctgggcgctttgtggccgagtcggccgaagtgctgctaccccggctggtgagctgcccgggacccctggaccaggaccagcaggaggcagccagggcggctctgcagggcgggggacccccctacggccccccgtcgacatggtctgtctccacgatggacgctctgcggggcctgctgcccgtgctgggccagcccatcatccgcagcatcccgcagggcatcgtggccgcgtggcggcaacgctcctctcgggacccatcctggcggcagcctgaacggaccatcctccggccgcggttccggcgggaagtggagaagacagcctgtccttcaggcaagaaggcccgcgagatagacgagagcctcatcttctacaagaagtgggagctggaagcctgcgtggatgcggccctgctggccacccagatggaccgcgtgaacgccatccccttcacctacgagcagctggacgtcctaaagcataaactggatgagctctacccacaaggttaccccgagtctgtgatccagcacctgggctacctcttcctcaagatgagccctgaggacattcgcaagtggaatgtgacgtccctggagaccctgaaggctttgcttgaagtcaacaaagggcacgaaatgagtcctcaggtggccaccctgatcgaccgctttgtgaagggaaggggccagctagacaaagacaccctagacaccctgaccgccttctaccctgggtacctgtgctccctcagccccgaggagctgagctccgtgccccccagcagcatctgggcggtcaggccccaggacctggacacgtgtgacccaaggcagctggacgtcctctatcccaaggcccgccttgctttccagaacatgaacgggtccgaatacttcgtgaagatccagtccttcctgggtggggcccccacggaggatttgaaggcgctcagtcagcagaatgtgagcatggacttggccacgttcatgaagctgcggacggatgcggtgctgccgttgactgtggctgaggtgcagaaacttctgggaccccacgtggagggcctgaaggcggaggagcggcaccgcccggtgcgggactggatcctacggcagcggcaggacgacctggacacgctggggctggggctacagggcggcatccccaacggctacctggtcctagacctcagcgtgcaagaggccctctcggggacgccctgcctcctaggacctggacctgttctcaccgtcctggcactgctcctagcctccaccctggcctgagggccccactcccttgctggccccagccctgctggggatccccgcctggccaggagcaggcacgggtgatccccgttccaccccaagagaactcgcgctcagtaaacgggaacatgccccctgcagacacgt

SEQ ID NO: 205 - protein, 622 aa, Homo sapiens
MALPTARPLLGSCGTPALGSLLFLLFSLGWVQPSRTLAGETGQEAAPLDGVLANPPNISSLSPRQLLGFPCAEVSGLSTERVRELAVALAQKNVKLSTEQLRCLAHRLSEPPEDLDALPLDLLLFLNPDAFSGPQACTRFFSRITKANVDLLPRGAPERQRLLPAALACWGVRGSLLSEADVRALGGLACDLPGRFVAESAEVLLPRLVSCPGPLDQDQQEAARAALQGGGPPYGPPSTWSVSTMDALRGLLPVLGQPIIRSIPQGIVAAWRQRSSRDPSWRQPERTILRPRFRREVEKTACPSGKKAREIDESLIFYKKWELEACVDAALLATQMDRVNAIPFTYEQLDVLKHKLDELYPQGYPESVIQHLGYLFLKMSPEDIRKWNVTSLETLKALLEVNKGHEMSPQVATLIDRFVKGRGQLDKDTLDTLTAFYPGYLCSLSPEELSSVPPSSIWAVRPQDLDTCDPRQLDVLYPKARLAFQNMNGSEYFVKIQSFLGGAPTEDLKALSQQNVSMDLATFMKLRTDAVLPLTVAEVQKLLGPHVEGLKAEERHRPVRDWILRQRQDDLDTLGLGLQGGIPNGYLVLDLSVQEALSGTPCLLGPGPVLTVLALLLASTLA

SEQ ID NO: 206 - DNA, 2111 bp, Homo sapiens
ggccggccactcccgtctgctgtgacgcgcggacagagagctaccggtggacccacggtgcctccctccctgggatctacacagaccatggccttgccaacggctcgacccctgttggggtcctgtgggacccccgccctcggcagcctcctgttcctgctcttcagcctcggatgggtgcagccctcgaggaccctggctggagagacagggcaggaggctgcacccctggacggagtcctggccaacccacctaacatttccagcctctcccctcgccaactccttggcttcccgtgtgcggaggtgtccggcctgagcacggagcgtgtccgggagctggctgtggccttggcacagaagaatgtcaagctctcaacagagcagctgcgctgtctggctcaccggctctctgagccccccgaggacctggacgccctcccattggacctgctgctattcctcaacccagatgcgttctcggggccccaggcctgcacccgtttcttctcccgcatcacgaaggccaatgtggacctgctcccgaggggggctcccgagcgacagcggctgctgcctgcggctctggcctgctggggtgtgcgggggtctctgctgagcgaggctgatgtgcgggctctgggaggcctggcttgcgacctgcctgggcgctttgtggccgagtcggccgaagtgctgctaccccggctggtgagctgcccgggacccctggaccaggaccagcaggaggcagccagggcggctctgcagggcgggggacccccctacggccccccgtcgacatggtctgtctccacgatggacgctctgcggggcctgctgcccgtgctgggccagcccatcatccgcagcatcccgcagggcatcgtggccgcgtggcggcaacgctcctctcgggacccatcctggcggcagcctgaacggaccatcctccggccgcggttccggcgggaagtggagaagacagcctgtccttcaggcaagaaggcccgcgagatagacgagagcctcatcttctacaagaagtgggagctggaagcctgcgtggatgcggccctgctggccacccagatggaccgcgtgaacgccatccccttcacctacgagcagctggacgtcctaaagcataaactggatgagctctacccacaaggttaccccgagtctgtgatccagcacctgggctacctcttcctcaagatgagccctgaggacattcgcaagtggaatgtgacgtccctggagaccctgaaggctttgcttgaagtcaacaaagggcacgaaatgagtcctcaggtggccaccctgatcgaccgctttgtgaagggaaggggccagctagacaaagacaccctagacaccctgaccgccttctaccctgggtacctgtgctccctcagccccgaggagctgagctccgtgccccccagcagcatctgggcggtcaggccccaggacctggacacgtgtgacccaaggcagctggacgtcctctatcccaaggcccgccttgctttccagaacatgaacgggtccgaatacttcgtgaagatccagtccttcctgggtggggcccccacggaggatttgaaggcgctcagtcagcagaatgtgagcatggacttggccacgttcatgaagctgcggacggatgcggtgctgccgttgactgtggctgaggtgcagaaacttctgggaccccacgtggagggcctgaaggcggaggagcggcaccgcccggtgcgggactggatcctacggcagcggcaggacgacctggacacgctggggctggggctacagggcggcatccccaacggctacctggtcctagacctcagcgtgcaagaggccctctcggggacgccctgcctcctaggacctggacctgttctcaccgtcctggcactgctcctagcctccaccctggcctgagggccccactcccttgctggccccagccctgctggggatccccgcctggccaggagcaggcacgggtgatccccgttccaccccaagagaactcgcgctcagtaaacgggaacatgccccctgcagacacgtaaaaaaaaaaaaaaaaaaaaaaa

SEQ ID NO: 207 - DNA, 2107 bp, Homo sapiens
tggccggccactcccgtctgctgtgacgcgcggacagagagctaccggtggacccacggtgcctccctccctgggatctacacagaccatggccttgcaacggctcgacccctgttggtcctgtggggaccgccctggcagcctcctgttcctgctcttcagcctcggatgggtgcatcccgcgaggaccctggctggagagacagggacggagtctgcccccctggggggagtcctgacaaccccccataacatttccagcctctcccctcgccaactccttggcttcccgtgtgcggaggtgtccggcctgagcacggagcgtgtccgggagctggctgtggccttggcacagaagaatgtcaagctctcaacagagcagctgcgctgtctggctcaccggctctctgagccccccgaggacctggacgccctcccattggacctgctgctattcctcaacccagatgcgttctcggggccccaggcctgcacccgtttcttctcccgcatcacgaaggccaatgtggacctgctcccgaggggggctcccgagcgacagcggctgctgcctgcggctctggcctgctggggtgtgcgggggtctctgctgagcgaggctgatgtgcgggctctgggaggcctggcttgcgacctgcctgggcgctttgtggccgagtcggccgaagtgctgctaccccggctggtgagctgcccgggacccctggaccaggaccagcaggaggcagccagggcggctctgcagggcgggggacccccctacggccccccgtcgacatggtctgtctccacgatggacgctctgcggggcctgctgcccgtgctgggccagcccatcatccgcagcatcccgcagggcatcgtggccgcgtggcggcaacgctcctctcgggacccatcctggcggcagcctgaacggaccatcctccggccgcggttccggcgggaagtggagaagacagcctgtccttcaggcaagaaggcccgcgagatagacgagagcctcatcttctacaagaagtgggagctggaagcctgcgtggatgcggccctgctggccacccagatggaccgcgtgaacgccatccccttcacctacgagcagctggacgtcctaaagcataaactggatgagctctacccacaaggttaccccgagtctgtgatccagcacctgggctacctcttcctcaagatgagccctgaggacattcgcaagtggaatgtgacgtccctggagaccctgaaggctttgcttgaagtcgacaaagggcacgaaatgagtcctcaggctcctcggcggcccctcccacaggtggccaccctgatcgaccgctttgtgaagggaaggggccagctagacaaagacaccctagacaccctgaccgccttctaccctgggtacctgtgctccctcagccccgaggagctgagctccgtgccccccagcagcatctgggcggtcaggccccaggacctggacacgtgtgacccaaggcagctggacgtcctctatcccaaggcccgccttgctttccagaacatgaacgggtccgaatacttcgtgaagatccagtccttcctgggtggggcccccacggaggatttgaaggcgctcagtcagcagaatgtgagcatggacttggccacgttcatgaagctgcggacggatgcggtgctgccgttgactgtggctgaggtgcagaaacttctgggaccccacgtggagggcctgaaggcggaggagcggcaccgcccggtgcgggactggatcctacggcagcggcaggacgacctggacacgctggggctggggctacagggcggcatccccaacggctacctggtcctagacctcagcgtgcaagagaccctctcggggacgccctgcctcctaggacctggacctgttctcaccgtcctggcactgctcctagcctccaccctggcctgagggccccactcccttgctggccccagccctgctggggatccccgcctggccaggagcaggcacgggtgatccccgttccaccccaagagaactcgcgctcagtaaacgggaacatgccccctgcagacacgt

SEQ ID NO: 208 - protein, 628 aa, Homo sapiens
MALQRLDPCWSCGDRPGSLLFLLFSLGWVHPARTLAGETGTESAPLGGVLTTPHNISSLSPRQLLGFPCAEVSGLSTERVRELAVALAQKNVKLSTEQLRCLAHRLSEPPEDLDALPLDLLLFLNPDAFSGPQACTRFFSRITKANVDLLPRGAPERQRLLPAALACWGVRGSLLSEADVRALGGLACDLPGRFVAESAEVLLPRLVSCPGPLDQDQQEAARAALQGGGPPYGPPSTWSVSTMDALRGLLPVLGQPIIRSIPQGIVAAWRQRSSRDPSWRQPERTILRPRFRREVEKTACPSGKKAREIDESLIFYKKWELEACVDAALLATQMDRVNAIPFTYEQLDVLKHKLDELYPQGYPESVIQHLGYLFLKMSPEDIRKWNVTSLETLKALLEVDKGHEMSPQAPRRPLPQVATLIDRFVKGRGQLDKDTLDTLTAFYPGYLCSLSPEELSSVPPSSIWAVRPQDLDTCDPRQLDVLYPKARLAFQNMNGSEYFVKIQSFLGGAPTEDLKALSQQNVSMDLATFMKLRTDAVLPLTVAEVQKLLGPHVEGLKAEERHRPVRDWILRQRQDDLDTLGLGLQGGIPNGYLVLDLSVQETLSGTPCLLGPGPVLTVLALLLASTLA

SEQ ID NO: 209 - DNA, 2316 bp, Homo sapiens
ctatagggagtcgacccacgcgtccgccgggcgttaggggtaaagctccctacccaactgcgcagaaggcctcagaggcctgggggctgggcttcccctttcacatcgccctttagaggcccacgtgtgggcattggccsgcgatctgaaaggggctgtcctgttcctcatgggcgctgccagcgccacgcactcctctttctgcctggccggccactcccgtctgctgtgacgcgcggacagagagctaccggtggacccacggtgcctccctccctgggatctacacagaccatggccttgccaacggctcgacccctgttggggtcctgtgggacccccgccctcggcagcctcctgttcctgctcttcagcctcggatgggtgcagccctcgaggaccctggctggagagacagggcaggaggctgcgcccctggacggagtcctggccaacccacctaacatttccagcctctcccctcgccaactccttggcttcccgtgtgcggaggtgtccggcctgagcacggagcgtgtccgggagctggctgtggccttggcacagaagaatgtcaagctctcaacagagcagctgcgctgtctggctcaccggctctctgagccccccgaggacctggacgccctcccattggacctgctgctattcctyaacccagatgcgttctcggggccccaggcctgcacccgtttcttctcccgcatcacgaaggccaatgtggacctgctcccgaggggggctcccgagcgacagcggctgctgcctgcggctctggcctgctggggtgtgcgggggtctctgctgagcgaggctgatgtgcgggctctgggaggcctggcttgcgacctgcctgggcgctttgtggccgagtcggccgaagtgctgctaccccggctggtgagctgcccgggacccctggaccaggaccagcaggaggcagccagggcggctctgcagggcgggggacccccctacggccccccgtcgacatggtctgtctccacgatggacgctctgcggggcctgctgcccgtgctgggccagcccatcatccgcagcatcccgcagggcatcgtggccgcgtggcggcaacgctcctctcgggacccatcctggcggcagcctgaacggaccatcctccggccgcggttccggcgggaagtggagaagacagcctgtccttcaggcaagaaggcccgcgagatagacgagagcctcatcttctacaagaagtgggagctggaagcctgcgtggatgcggccctgctggccacccagatggaccgcgtgaacgccatccccttcacctacgagcagctggacgtcctaaagcataaactggatgagctctacccacaaggttaccccgagtctgtgatccagcacctgggctacctcttcctcaagatgagccctgaggacattcgcaagtggaatgtgacgtccctggagaccctgaaggctttgcttgaagtcgacaaagggcacgaaatgagtcctcaggctcctcggcggcccctcccacaggtggccaccctgatcgaccgctttgtgaagggaaggggccagctagacaaagacaccctagacaccctgaccgccttctaccctgggtacctgtgctccctcagccccgaggagctgagctccgtgccccccagcagcatctgggcggtcaggccccaggacctggacacgtgtgacccaaggcagctggacgtcctctatcccaaggcccgccttgctttccagaacatgaacgggtccgaatacttcgtgaagatccagtccttcctgggtggggcccccacggaggatttgaaggcgctcagtcagcagaatgtgagcatggacttggccacgttcatgaagctgcggacggatgcggtgctgccgttgactgtggctgaggtgcagaaacttctgggaccccacgtggagggcctgaaggcggaggagcggcaccgcccggtgcgggactggatcctacggcagcggcaggacgacctggacacgctggggctggggctacagggcggcatccccaacggctacctggtcctagacctcagcgtgcaagasrccctctcggggacgccctgcctcctaggacctggacctgttctcaccgtcctggcactgctcctagcctccaccctggcctgagggccccactcccttgctggccccagccctgctggggatccccgcctggccaggagcaggcacgggtgatccccgttccaccccaagagaactcgcgctcagtaaacgggaacatgccccctgcagaca

SEQ ID NO: 210 - protein, 630 aa, Homo sapiens
  VARIANT (1)...(630): Xaa = Any Amino Acid
MALPTARPLLGSCGTPALGSLLFLLFSLGWVQPSRTLAGETGQEAAPLDGVLANPPNISSLSPRQLLGFPCAEVSGLSTERVRELAVALAQKNVKLSTEQLRCLAHRLSEPPEDLDALPLDLLLFLNPDAFSGPQACTRFFSRITKANVDLLPRGAPERQRLLPAALACWGVRGSLLSEADVRALGGLACDLPGRFVAESAEVLLPRLVSCPGPLDQDQQEAARAALQGGGPPYGPPSTWSVSTMDALRGLLPVLGQPIIRSIPQGIVAAWRQRSSRDPSWRQPERTILRPRFRREVEKTACPSGKKAREIDESLIFYKKWELEACVDAALLATQMDRVNAIPFTYEQLDVLKHKLDELYPQGYPESVIQHLGYLFLKMSPEDIRKWNVTSLETLKALLEVDKGHEMSPQAPRRPLPQVATLIDRFVKGRGQLDKDTLDTLTAFYPGYLCSLSPEELSSVPPSSIWAVRPQDLDTCDPRQLDVLYPKARLAFQNMNGSEYFVKIQSFLGGAPTEDLKALSQQNVSMDLATFMKLRTDAVLPLTVAEVQKLLGPHVEGLKAEERHRPVRDWILRQRQDDLDTLGLGLQGGIPNGYLVLDLSVQXXLSGTPCLLGPGPVLTVLALLLASTLA

SEQ ID NO: 211 - DNA, 1721 bp, Homo sapiens
gaattccctggctgcttgaatctgttctgccccctccccacccatttcaccaccaccatgacaccgggcacccagtctcctttcttcctgctgctgctcctcacagtgcttacagttgttacaggttctggtcatgcaagctctaccccaggtggagaaaaggagacttcggctacccagagaagttcagtgcccagctctactgagaagaatgctgtgagtatgaccagcagcgtactctccagccacagccccggttcaggctcctccaccactcagggacaggatgtcactctggccccggccacggaaccagcttcaggttcagctgccacctggggacaggatgtcacctcggtcccagtcaccaggccagccctgggctccaccaccccgccagcccacgatgtcacctcagccccggacaacaagccagccccgggctccaccgcccccccagcccacggtgtcacctcggccccggacaccaggccgcccccgggctccaccgcccccccagcccacggtgtcacctcggccccggacaccaggccgcccccgggctccaccgcgcccgcagcccacggtgtcacctcggccccggacaccaggccggccccgggctccaccgcccccccagcccatggtgtcacctcggccccggacaacaggcccgccttggcgtccaccgcccctccagtccacaatgtcacctcggcctcaggctctgcatcaggctcagcttctactctggtgcacaacggcacctctgccagggctaccacaaccccagccagcaagagcactccattctcaattcccagccaccactctgatactcctaccacccttgccagccatagcaccaagactgatgccagtagcactcaccatagcacggtacctcctctcacctcctccaatcacagcacttctccccagttgtctactggggtctctttctttttcctgtcttttcacatttcaaacctccagtttaattcctctctggaagatcccagcaccgactactaccaagagctgcagagagacatttctgaaatgtttttgcagatttataaacaagggggttttctgggcctctccaatattaagttcaggccaggatctgtggtggtacaattgactctggccttccgagaaggtaccatcaatgtccacgacgtggagacacagttcaatcagtataaaacggaagcagcctctcgatataacctgacgatctcagacgtcagcgtgagtgatgtgccatttcctttctctgcccagtctggggctggggtgccaggctggggcatcgcgctgctggtgctggtctgtgttctggttgcgctggccattgtctatctcattgccttggctgtctgtcagtgccgccgaaagaactacgggcagctggacatctttccagcccgggatacctaccatcctatgagcgagtaccccacctaccacacccatgggcgctatgtgccccctagcagtaccgatcgtagcccctatgagaaggtttctgcaggtaatggtggcagcagcctctcttacacaaacccagcagtggcagccacttctgccaacttgtaggggcacgtcgccctctgagctgagtggccagccagtgccattccactccactcagggctctctgggccagtcctcctgggagcccccaccacaacacttcccaggcatggaattcc

SEQ ID NO: 212 - protein, 515 aa, Homo sapiens
MTPGTQSPFFLLLLLTVLTVVTGSGHASSTPGGEKETSATQRSSVPSSTEKNAVSMTSSVLSSHSPGSGSSTTQGQDVTLAPATEPASGSAATWGQDVTSVPVTRPALGSTTPPAHDVTSAPDNKPAPGSTAPPAHGVTSAPDTRPPPGSTAPPAHGVTSAPDTRPPPGSTAPAAHGVTSAPDTRPAPGSTAPPAHGVTSAPDNRPALASTAPPVHNVTSASGSASGSASTLVHNGTSARATTTPASKSTPFSIPSHHSDTPTTLASHSTKTDASSTHHSTVPPLTSSNHSTSPQLSTGVSFFFLSFHISNLQFNSSLEDPSTDYYQELQRDISEMFLQIYKQGGFLGLSNIKFRPGSVVVQLTLAFREGTINVHDVETQFNQYKTEAASRYNLTISDVSVSDVPFPFSAQSGAGVPGWGIALLVLVCVLVALAIVYLIALAVCQCRRKNYGQLDIFPARDTYHPMSEYPTYHTHGRYVPPSSTDRSPYEKVSAGNGGSSLSYTNPAVAATSANL

SEQ ID NO: 213 - DNA, 5793 bp, Homo sapiens
cctggactggacagagagcggctatactgggagctgagccagctgaccaacagcatcacagagctgggaccctacaccctggatagggacagtctctatgtcaatggcttcaacccttggagctctgtgccaaccaccagcactcctgggacctccacagtgcacctggcaacctctgggactccatcctccctgcctggccacacagcccctgtccctctcttgataccattcaccctcaactttaccatcaccaacctgcattatgaagaaaacatgcaacaccctggttccaggaagttcaacaccacggagagggttctgcagggtctgctcaagcccttgttcaagagcaccagcgttggccctctgtactctggctgcagactgaccttgctcagacctgagaaacatggggcagccactggagtggacgccatctgcaccctccgccttgatcccactggtcctggactggacagagagcggctatactgggagctgagccagctgaccaacagcgttacagagctgggcccctacaccctggacagggacagtctctatgtcaatggcttcacccatcggagctctgtgccaaccaccagtattcctgggacctctgcagtgcacctggaaacctctgggactccagcctccctccctggccacacagcccctggccctctcctggtgccattcaccctcaacttcactatcaccaacctgcagtatgaggaggacatgcgtcaccctggttccaggaagttcaacaccacggagagagtcctgcagggtctgctcaagcccttgttcaagagcaccagtgttggccctctgtactctggctgcagactgaccttgctcaggcctgaaaaacgtggggcagccaccggcgtggacaccatctgcactcaccgccttgaccctctaaaccctggactggacagagagcagctatactgggagctgagcaaactgacccgtggcatcatcgagctgggcccctacctcctggacagaggcagtctctatgtcaatggtttcacccatcggaactttgtgcccatcaccagcactcctgggacctccacagtacacctaggaacctctgaaactccatcctccctacctagacccatagtgcctggccctctcctggtgccattcaccctcaacttcaccatcaccaacttgcagtatgaggaggccatgcgacaccctggctccaggaagttcaataccacggagagggtcctacagggtctgctcaggcccttgttcaagaataccagtatcggccctctgtactccagctgcagactgaccttgctcaggccagagaaggacaaggcagccaccagagtggatgccatctgtacccaccaccctgaccctcaaagccctggactgaacagagagcagctgtactgggagctgagccagctgacccacggcatcactgagctgggcccctacaccctggacagggacagtctctatgtcgatggtttcactcattggagccccataccaaccaccagcactcctgggacctccatagtgaacctgggaacctctgggatcccaccttccctccctgaaactacagccaccggccctctcctggtgccattcacactcaacttcaccatcactaacctacagtatgaggagaacatgggtcaccctggctccaggaagttcaacatcacggagagtgttctgcagggtctgctcaagcccttgttcaagagcaccagtgttggccctctgtattctggctgcagactgaccttgctcaggcctgagaaggacggagtagccaccagagtggacgccatctgcacccaccgccctgaccccaaaatccctgggctagacagacagcagctatactgggagctgagccagctgacccacagcatcactgagctgggaccctacaccctggatagggacagtctctatgtcaatggtttcacccagcggagctctgtgcccaccaccagcactcctgggactttcacagtacagccggaaacctctgagactccatcatccctccctggccccacagccactggccctgtcctgctgccattcaccctcaattttaccatcattaacctgcagtatgaggaggacatgcatcgccctggctccaggaagttcaacaccacggagagggtccttcagggtctgcttatgcccttgttcaagaacaccagtgtcagctctctgtactctggttgcagactgaccttgctcaggcctgagaaggatggggcagccaccagagtggatgctgtctgcacccatcgtcctgaccccaaaagccctggactggacagagagcggctgtactggaagctgagccagctgacccacggcatcactgagctgggcccctacaccctggacaggcacagtctctatgtcaatggtttcacccatcagagctctatgacgaccaccagaactcctgatacctccacaatgcacctggcaacctcgagaactccagcctccctgtctggacctacgaccgccagccctctcctggtgctattcacaattaacttcaccatcactaacctgcggtatgaggagaacatgcatcaccctggctctagaaagtttaacaccacggagagagtccttcagggtctgctcaggcctgtgttcaagaacaccagtgttggccctctgtactctggctgcagactgaccttgctcaggcccaagaaggatggggcagccaccaaagtggatgccatctgcacctaccgccctgatcccaaaagccctggactggacagagagcagctatactgggagctgagccagctaacccacagcatcactgagctgggcccctacaccctggacagggacagtctctatgtcaatggtttcacacagcggagctctgtgcccaccactagcattcctgggacccccacagtggacctgggaacatctgggactccagtttctaaacctggtccctcggctgccagccctctcctggtgctattcactctcaacttcaccatcaccaacctgcggtatgaggagaacatgcagcaccctggctccaggaagttcaacaccacggagagggtccttcagggcctgctcaggtccctgttcaagagcaccagtgttggccctctgtactctggctgcagactgactttgctcaggcctgaaaaggatgggacagccactggagtggatgccatctgcacccaccaccctgaccccaaaagccctaggctggacagagagcagctgtattgggagctgagccagctgacccacaatatcactgagctgggccactatgccctggacaacgacagcctctttgtcaatggtttcactcatcggagctctgtgtccaccaccagcactcctgggacccccacagtgtatctgggagcatctaagactccagcctcgatatttggcccttcagctgccagccatctcctgatactattcaccctcaacttcaccatcactaacctgcggtatgaggagaacatgtggcctggctccaggaagttcaacactacagagagggtccttcagggcctgctaaggcccttgttcaagaacaccagtgttggccctctgtactctggctccaggctgaccttgctcaggccagagaaagatggggaagccaccggagtggatgccatctgcacccaccgccctgaccccacaggccctgggctggacagagagcagctgtatttggagctgagccagctgacccacagcatcactgagctgggcccctacacactggacagggacagtctctatgtcaatggtttcacccatcggagctctgtacccaccaccagcaccggggtggtcagcgaggagccattcacactgaacttcaccatcaacaacctgcgctacatggcggacatgggccaacccggctccctcaagttcaacatcacagacaacgtcatgaagcacctgctcagtcctttgttccagaggagcagcctgggtgcacggtacacaggctgcagggtcatcgcactaaggtctgtgaagaacggtgctgagacacgggtggacctcctctgcacctacctgcagcccctcagcggcccaggtctgcctatcaagcaggtgttccatgagctgagccagcagacccatggcatcacccggctgggcccctactctctggacaaagacagcctctaccttaacggttacaatgaacctggtctagatgagcctcctacaactcccaagccagccaccacattcctgcctcctctgtcagaagccacaacagccatggggtaccacctgaagaccctcacactcaacttcaccatctccaatctccagtattcaccagatatgggcaagggctcagctacattcaactccaccgagggggtccttcagcacctgctcagacccttgttccagaagagcagcatgggccccttctacttgggttgccaactgatctccctcaggcctgagaaggatggggcagccactggtgtggacaccacctgcacctaccaccctgaccctgtgggccccgggctggacatacagcagctttactgggagctgagtcagctgacccatggtgtcacccaactgggcttctatgtcctggacagggatagcctcttcatcaatggctatgcaccccagaatttatcaatccggggcgagtaccagataaatttccacattgtcaactggaacctcagtaatccagaccccacatcctcagagtacatcaccctgctgagggacatccaggacaaggtcaccacactctacaaaggcagtcaactacatgacacattccgcttctgcctggtcaccaacttgacgatggactccgtgttggtcactgtcaaggcattgttctcctccaatttggaccccagcctggtggagcaagtctttctagataagaccctgaatgcctcattccattggctgggctccacctaccagttggtggacatccatgtgacagaaatggagtcatcagtttatcaaccaacaagcagctccagcacccagcacttctaccygaatttcaccatcaccaacctaccatattcccaggacaaagcccagccaggcaccaccaattaccagaggaacaaaaggaatattgaggatgcggtgagaagggggtgctcaaccaactcttccgaaacagcagcatcaagagttatttttctgactgtcaagtttcaacattcaggtctgtccccaacaggcaccacaccggggtggactccctgtgtaacttctcgccactggctcggagagtagacagagttgccatctatgaggaatttctgcggatgacccggaatggtacccagctgcagaacttcaccctggacaggagcagtgtccttgtggatgggtattctcccaacagaaatgagcccttaactgggaattctgaccttcccttctgggctgtcatcttcatcggcttggcaggactcctgggactcatcacatgcctgatctgcggtgtcctggtgaccacccgccggcggaagaaggaaggagaatacaacgtccagcaacagtgcccaggctactaccagtcacacctagacctggaggatctgcaatgactggaacttgccggtgcctggggtgcctttcccccagccagggtccaaagaagcttggctggggcagaaataaaccatattggtcggaaaaaaaaaaaaaaaaaaaaaaaaaaaaaaaaaaaaa

SEQ ID NO: 214 - protein, 1783 aa, Homo sapiens
  VARIANT (1)...(1783): Xaa = Any Amino Acid
PGLDRERLYWELSQLTNSITELGPYTLDRDSLYVNGFNPWSSVPTTSTPGTSTVHLATSGTPSSLPGHTAPVPLLIPFTLNFTITNLHYEENMQHPGSRKFNTTERVLQGLLKPLFKSTSVGPLYSGCRLTLLRPEKHGAATGVDAICTLRLDPTGPGLDRERLYWELSQLTNSVTELGPYTLDRDSLYVNGFTHRSSVPTTSIPGTSAVHLETSGTPASLPGHTAPGPLLVPFTLNFTITNLQYEEDMRHPGSRKFNTTERVLQGLLKPLFKSTSVGPLYSGCRLTLLRPEKRGAATGVDTICTHRLDPLNPGLDREQLYWELSKLTRGIIELGPYLLDRGSLYVNGFTHRNFVPITSTPGTSTVHLGTSETPSSLPRPIVPGPLLVPFTLNFTITNLQYEEAMRHPGSRKFNTTERVLQGLLRPLFKNTSIGPLYSSCRLTLLRPEKDKAATRVDAICTHHPDPQSPGLNREQLYWELSQLTHGITELGPYTLDRDSLYVDGFTHWSPIPTTSTPGTSIVNLGTSGIPPSLPETTATGPLLVPFTLNFTITNLQYEENMGHPGSRKFNITESVLQGLLKPLFKSTSVGPLYSGCRLTLLRPEKDGVATRVDAICTHRPDPKIPGLDRQQLYWELSQLTHSITELGPYTLDRDSLYVNGFTQRSSVPTTSTPGTFTVQPETSETPSSLPGPTATGPVLLPFTLNFTIINLQYEEDMHRPGSRKFNTTERVLQGLLMPLFKNTSVSSLYSGCRLTLLRPEKDGAATRVDAVCTHRPDPKSPGLDRERLYWKLSQLTHGITELGPYTLDRHSLYVNGFTHQSSMTTTRTPDTSTMHLATSRTPASLSGPTTASPLLVLFTINFTITNLRYEENMHHPGSRKFNTTERVLQGLLRPVFKNTSVGPLYSGCRLTLLRPKKDGAATKVDAICTYRPDPKSPGLDREQLYWELSQLTHSITELGPYTLDRDSLYVNGFTQRSSVPTTSIPGTPTVDLGTSGTPVSKPGPSAASPLLVLFTLNFTITNLRYEENMQHPGSRKFNTTERVLQGLLRSLFKSTSVGPLYSGCRLTLLRPEKDGTATGVDAICTHHPDPKSPRLDREQLYWELSQLTHNITELGHYALDNDSLFVNGFTHRSSVSTTSTPGTPTVYLGASKTPASIFGPSAASHLLILFTLNFTITNLRYEENMWPGSRKFNTTERVLQGLLRPLFKNTSVGPLYSGSRLTLLRPEKDGEATGVDAICTHRPDPTGPGLDREQLYLELSQLTHSITELGPYTLDRDSLYVNGFTHRSSVPTTSTGVVSEEPFTLNFTINNLRYMADMGQPGSLKFNITDNVMKHLLSPLFQRSSLGARYTGCRVIALRSVKNGAETRVDLLCTYLQPLSGPGLPIKQVFHELSQQTHGITRLGPYSLDKDSLYLNGYNEPGLDEPPTTPKPATTFLPPLSEATTAMGYHLKTLTLNFTISNLQYSPDMGKGSATFNSTEGVLQHLLRPLFQKSSMGPFYLGCQLISLRPEKDGAATGVDTTCTYHPDPVGPGLDIQQLYWELSQLTHGVTQLGFYVLDRDSLFINGYAPQNLSIRGEYQINFHIVNWNLSNPDPTSSEYITLLRDIQDKVTTLYKGSQLHDTFRFCLVTNLTMDSVLVTVKALFSSNLDPSLVEQVFLDKTLNASFHWLGSTYQLVDIHVTEMESSVYQPTSSSSTQHFYXNFTITNLPYSQDKAQPGTTNYQRNKRNIEDAVRRGCSTNSSETAASRVIFLTVKFQHSGLSPTGTTPGWTPCVTSRHWLGE

SEQ ID NO: 215 - DNA, 5797 bp, Homo sapiens
cgcgttgatcccatcggacctggactggacagagagcggctatactgggagctgagccagctgaccaacagcatcacagagctgggaccctacaccctggatagggacagtctctatgtcaatggcttcaacccttggagctctgtgccaaccaccagcactcctgggacctccacagtgcacctggcaacctctgggactccatcctccctgcctggccacacagcccctgtccctctcttgataccattcaccctcaactttaccatcaccaacctgcattatgaagaaaacatgcaacaccctggttccaggaagttcaacaccacggagagggttctgcagggtctgctcaagcccttgttcaagagcaccagcgttggccctctgtactctggctgcagactgaccttgctcagacctgagaaacatggggcagccactggagtggacgccatctgcaccctccgccttgatcccactggtcctggactggacagagagcggctatactgggagctgagccagctgaccaacagcgttacagagctgggcccctacaccctggacagggacagtctctatgtcaatggcttcacccatcggagctctgtgccaaccaccagtattcctgggacctctgcagtgcacctggaaacctctgggactccagcctccctccctggccacacagcccctggccctctcctggtgccattcaccctcaacttcactatcaccaacctgcagtatgaggaggacatgcgtcaccctggttccaggaagttcaacaccacggagagagtcctgcagggtctgctcaagcccttgttcaagagcaccagtgttggccctctgtactctggctgcagactgaccttgctcaggcctgaaaaacgtggggcagccaccggcgtggacaccatctgcactcaccgccttgaccctctaaaccctggactggacagagagcagctatactgggagctgagcaaactgacccgtggcatcatcgagctgggcccctacctcctggacagaggcagtctctatgtcaatggtttcacccatcggaactttgtgcccatcaccagcactcctgggacctccacagtacacctaggaacctctgaaactccatcctccctacctagacccatagtgcctggccctctcctggtgccattcaccctcaacttcaccatcaccaacttgcagtatgaggaggccatgcgacaccctggctccaggaagttcaataccacggagagggtcctacagggtctgctcaggcccttgttcaagaataccagtatcggccctctgtactccagctgcagactgaccttgctcaggccagagaaggacaaggcagccaccagagtggatgccatctgtacccaccaccctgaccctcaaagccctggactgaacagagagcagctgtactgggagctgagccagctgacccacggcatcactgagctgggcccctacaccctggacagggacagtctctatgtcgatggtttcactcattggagccccataccaaccaccagcactcctgggacctccatagtgaacctgggaacctctgggatcccaccttccctccctgaaactacagccaccggccctctcctggtgccattcacactcaacttcaccatcactaacctacagtatgaggagaacatgggtcaccctggctccaggaagttcaacatcacggagagtgttctgcagggtctgctcaagcccttgttcaagagcaccagtgttggccctctgtattctggctgcagactgaccttgctcaggcctgagaaggacggagtagccaccagagtggacgccatctgcacccaccgccctgaccccaaaatccctgggctagacagacagcagctatactgggagctgagccagctgacccacagcatcactgagctgggaccctacaccctggatagggacagtctctatgtcaatggtttcacccagcggagctctgtgcccaccaccagcactcctgggactttcacagtacagccggaaacctctgagactccatcatccctccctggccccacagccactggccctgtcctgctgccattcaccctcaattttaccatcattaacctgcagtatgaggaggacatgcatcgccctggctccaggaagttcaacaccacggagagggtccttcagggtctgcttatgcccttgttcaagaacaccagtgtcagctctctgtactctggttgcagactgaccttgctcaggcctgagaaggatggggcagccaccagagtggatgctgtctgcacccatcgtcctgaccccaaaagccctggactggacagagagcggctgtactggaagctgagccagctgacccacggcatcactgagctgggcccctacaccctggacaggcacagtctctatgtcaatggtttcacccatcagagctctatgacgaccaccagaactcctgatacctccacaatgcacctggcaacctcgagaactccagcctccctgtctggacctacgaccgccagccctctcctggtgctattcacaattaacttcaccatcactaacctgcggtatgaggagaacatgcatcaccctggctctagaaagtttaacaccacggagagagtccttcagggtctgctcaggcctgtgttcaagaacaccagtgttggccctctgtactctggctgcagactgaccttgctcaggcccaagaaggatggggcagccaccaaagtggatgccatctgcacctaccgccctgatcccaaaagccctggactggacagagagcagctatactgggagctgagccagctaacccacagcatcactgagctgggcccctacaccctggacagggacagtctctatgtcaatggtttcacacagcggagctctgtgcccaccactagcattcctgggacccccacagtggacctgggaacatctgggactccagtttctaaacctggtccctcggctgccagccctctcctggtgctattcactctcaacttcaccatcaccaacctgcggtatgaggagaacatgcagcaccctggctccaggaagttcaacaccacggagagggtccttcagggcctgctcaggtccctgttcaagagcaccagtgttggccctctgtactctggctgcagactgactttgctcaggcctgaaaaggatgggacagccactggagtggatgccatctgcacccaccaccctgaccccaaaagccctaggctggacagagagcagctgtattgggagctgagccagctgacccacaatatcactgagctgggcccctatgccctggacaacgacagcctctttgtcaatggtttcactcatcggagctctgtgtccaccaccagcactcctgggacccccacagtgtatctgggagcatctaagactccagcctcgatatttggcccttcagctgccagccatctcctgatactattcaccctcaacttcaccatcactaacctgcggtatgaggagaacatgtggcctggctccaggaagttcaacactacagagagggtccttcagggcctgctaaggcccttgttcaagaacaccagtgttggccctctgtactctggctgcaggctgaccttgctcaggccagagaaagatggggaagccaccggagtggatgccatctgcacccaccgccctgaccccacaggccctgggctggacagagagcagctgtatttggagctgagccagctgacccacagcatcactgagctgggcccctacacactggacagggacagtctctatgtcaatggtttcacccatcggagctctgtacccaccaccagcaccggggtggtcagcgaggagccattcacactgaacttcaccatcaacaacctgcgctacatggcggacatgggccaacccggctccctcaagttcaacatcacagacaacgtcatgcagcacctgctcagtcctttgttccagaggagcagcctgggtgcacggtacacaggctgcagggtcatcgcactaaggtctgtgaagaacggtgctgagacacgggtggacctcctctgcacctacctgcagcccctcagcggcccaggtctgcctatcaagcaggtgttccatgagctgagccagcagacccatggcatcacccggctgggcccctactctctggacaaagacagcctctaccttaacggttacaatgaacctggtccagatgagcctcctacaactcccaagccagccaccacattcctgcctcctctgtcagaagccacaacagccatggggtaccacctgaagaccctcacactcaacttcaccatctccaatctccagtattcaccagatatgggcaagggctcagctacattcaactccaccgagggggtccttcagcacctgctcagacccttgttccagaagagcagcatgggccccttctacttgggttgccaactgatctccctcaggcctgagaaggatggggcagccactggtgtggacaccacctgcacctaccaccctgaccctgtgggccccgggctggacatacagcagctttactgggagctgagtcagctgacccatggtgtcacccaactgggcttctatgtcctggacagggatagcctcttcatcaatggctatgcaccccagaatttatcaatccggggcgagtaccagataaatttccacattgtcaactggaacctcagtaatccagaccccacatcctcagagtacatcaccctgctgagggacatccaggacaaggtcaccacactctacaaaggcagtcaactacatgacacattccgcttctgcctggtcaccaacttgacgatggactccgtgttggtcactgtcaaggcattgttctcctccaatttggaccccagcctggtggagcaagtctttctagataagaccctgaatgcctcattccattggctgggctccacctaccagttggtggacatccatgtgacagaaatggagtcatcagtttatcaaccaacaagcagctccagcacccagcacttctacccgaatttcaccatcaccaacctaccatattcccaggacaaagcccagccaggcaccaccaattaccagaggaacaaaaggaatattgaggatgcgctcaaccaactcttccgaaacagcagcatcaagagttatttttctgactgtcaagtttcaacattcaggtctgtccccaacaggcaccacaccggggtggactccctgtgtaacttctcgccactggctcggagagtagacagagttgccatctatgaggaatttctgcggatgacccggaatggtacccagctgcagaacttcaccctggacaggagcagtgtccttgtggatgggtattctcccaacagaaatgagcccttaactgggaattctgaccttcccttctgggctgtcatcctcatcggcttggcaggactcctgggactcatcacatgcctgatctgcggtgtcctggtgaccacccgccggcggaagaaggaaggagaatacaacgtccagcaacagtgcccaggctactaccagtcacacctagacctggaggatctgcaatgactggaacttgccggtgcctggggtgcctttcccccagccagggtccaaagaagcttggctggggcagaaataaaccatattggtcggaaaaaaaaaaaaaaaaaaaaaaaaaaaaaaaaaaaaa

SEQ ID NO: 216 - protein, 1148 aa, Homo sapiens
MPLFKNTSVSSLYSGCRLTLLRPEKDGAATRVDAVCTHRPDPKSPGLDRERLYWKLSQLTHGITELGPYTLDRHSLYVNGFTHQSSMTTTRTPDTSTMHLATSRTPASLSGPTTASPLLVLFTINFTITNLRYEENMHHPGSRKFNTTERVLQGLLRPVFKNTSVGPLYSGCRLTLLRPKKDGAATKVDAICTYRPDPKSPGLDREQLYWELSQLTHSITELGPYTLDRDSLYVNGFTQRSSVPTTSIPGTPTVDLGTSGTPVSKPGPSAASPLLVLFTLNFTITNLRYEENMQHPGSRKFNTTERVLQGLLRSLFKSTSVGPLYSGCRLTLLRPEKDGTATGVDAICTHHPDPKSPRLDREQLYWELSQLTHNITELGHYALDNDSLFVNGFTHRSSVSTTSTPGTPTVYLGASKTPASIFGPSAASHLLILFTLNFTITNLRYEENMWPGSRKFNTTERVLQGLLRPLFKNTSVGPLYSGSRLTLLRPEKDGEATGVDAICTHRPDPTGPGLDREQLYLELSQLTHSITELGPYTLDRDSLYVNGFTHRSSVPTTSTGVVSEEPFTLNFTINNLRYMADMGQPGSLKFNITDNVMKHLLSPLFQRSSLGARYTGCRVIALRSVKNGAETRVDLLCTYLQPLSGPGLPIKQVFHELSQQTHGITRLGPYSLDKDSLYLNGYNEPGLDEPPTTPKPATTFLPPLSEATTAMGYHLKTLTLNFTISNLQYSPDMGKGSATFNSTEGVLQHLLRPLFQKSSMGPFYLGCQLISLRPEKDGAATGVDTTCTYHPDPVGPGLDIQQLYWELSQLTHGVTQLGFYVLDRDSLFINGYAPQNLSIRGEYQINFHIVNWNLSNPDPTSSEYITLLRDIQDKVTTLYKGSQLHDTFRFCLVTNLTMDSVLVTVKALFSSNLDPSLVEQVFLDKTLNASFHWLGSTYQLVDIHVTEMESSVYQPTSSSSTQHFYPNFTITNLPYSQDKAQPGTTNYQRNKRNIEDALNQLFRNSSIKSYFSDCQVSTFRSVPNRHHTGVDSLCNFSPLARRVDRVAIYEEFLRMTRNGTQLQNFTLDRSSVLVDGYSPNRNEPLTGNSDLPFWAVIFIGLAGLLGLITCLICGVLVTTRRRKKEGEYNVQQQCPGYYQSHLDLEDLQ

SEQ ID NO: 217 - protein, 1890 aa, Homo sapiens
RVDPIGPGLDRERLYWELSQLTNSITELGPYTLDRDSLYVNGFNPWSSVPTTSTPGTSTVHLATSGTPSSLPGHTAPVPLLIPFTLNFTITNLHYEENMQHPGSRKFNTTERVLQGLLKPLFKSTSVGPLYSGCRLTLLRPEKHGAATGVDAICTLRLDPTGPGLDRERLYWELSQLTNSVTELGPYTLDRDSLYVNGFTHRSSVPTTSIPGTSAVHLETSGTPASLPGHTAPGPLLVPFTLNFTITNLQYEEDMRHPGSRKFNTTERVLQGLLKPLFKSTSVGPLYSGCRLTLLRPEKRGAATGVDTICTHRLDPLNPGLDREQLYWELSKLTRGIIELGPYLLDRGSLYVNGFTHRNFVPITSTPGTSTVHLGTSETPSSLPRPIVPGPLLVPFTLNFTITNLQYEEAMRHPGSRKFNTTERVLQGLLRPLFKNTSIGPLYSSCRLTLLRPEKDKAATRVDAICTHHPDPQSPGLNREQLYWELSQLTHGITELGPYTLDRDSLYVDGFTHWSPIPTTSTPGTSIVNLGTSGIPPSLPETTATGPLLVPFTLNFTITNLQYEENMGHPGSRKFNITESVLQGLLKPLFKSTSVGPLYSGCRLTLLRPEKDGVATRVDAICTHRPDPKIPGLDRQQLYWELSQLTHSITELGPYTLDRDSLYVNGFTQRSSVPTTSTPGTFTVQPETSETPSSLPGPTATGPVLLPFTLNFTIINLQYEEDMHRPGSRKFNTTERVLQGLLMPLFKNTSVSSLYSGCRLTLLRPEKDGAATRVDAVCTHRPDPKSPGLDRERLYWKLSQLTHGITELGPYTLDRHSLYVNGFTHQSSMTTTRTPDTSTMHLATSRTPASLSGPTTASPLLVLFTINFTITNLRYEENMHHPGSRKFNTTERVLQGLLRPVFKNTSVGPLYSGCRLTLLRPKKDGAATKVDAICTYRPDPKSPGLDREQLYWELSQLTHSITELGPYTLDRDSLYVNGFTQRSSVPTTSIPGTPTVDLGTSGTPVSKPGPSAASPLLVLFTLNFTITNLRYEENMQHPGSRKFNTTERVLQGLLRSLFKSTSVGPLYSGCRLTLLRPEKDGTATGVDAICTHHPDPKSPRLDREQLYWELSQLTHNITELGPYALDNDSLFVNGFTHRSSVSTTSTPGTPTVYLGASKTPASIFGPSAASHLLILFTLNFTITNLRYEENMWPGSRKFNTTERVLQGLLRPLFKNTSVGPLYSGCRLTLLRPEKDGEATGVDAICTHRPDPTGPGLDREQLYLELSQLTHSITELGPYTLDRDSLYVNGFTHRSSVPTTSTGVVSEEPFTLNFTINNLRYMADMGQPGSLKFNITDNVMQHLLSPLFQRSSLGARYTGCRVIALRSVKNGAETRVDLLCTYLQPLSGPGLPIKQVFHELSQQTHGITRLGPYSLDKDSLYLNGYNEPGPDEPPTTPKPATTFLPPLSEATTAMGYHLKTLTLNFTISNLQYSPDMGKGSATFNSTEGVLQHLLRPLFQKSSMGPFYLGCQLISLRPEKDGAATGVDTTCTYHPDPVGPGLDIQQLYWELSQLTHGVTQLGFYVLDRDSLFINGYAPQNLSIRGEYQINFHIVNWNLSNPDPTSSEYITLLRDIQDKVTTLYKGSQLHDTFRFCLVTNLTMDSVLVTVKALFSSNLDPSLVEQVFLDKTLNASFHWLGSTYQLVDIHVTEMESSVYQPTSSSSTQHFYPNFTITNLPYSQDKAQPGTTNYQRNKRNIEDALNQLFRNSSIKSYFSDCQVSTFRSVPNRHHTGVDSLCNFSPLARRVDRVAIYEEFLRMTRNGTQLQNFTLDRSSVLVDGYSPNRNEPLTGNSDLPFWAVILIGLAGLLGLITCLICGVLVTTRRRKKEGEYNVQQQCPGYYQSHLDLEDLQ

SEQ ID NO: 218 - DNA, 4939 bp, Homo sapiens
ttctctctcctccttgcaattttcctttctgtctgggagcacgccaagatgtcccttgtgactgtccccttctaccagaagagacataggcacttcgaccagtcctaccgtaatattcaaacacggtacctgctggacgaatatgcgtcaaaaaagcgagcttccacccaggcatcttcccagaagtccttgagtcagcggtcgtcttcacagagagcctccagccagacgtccctgggaggaaccatctgcagggtctgtgcgaagcgagtgagcacgcaggaagatgaggagcaggagaacagaagcaggtaccagtccctggtggccgcctatggtgaggccaagcgacacggcttcctcagcgagctggcccacttggaggaggatgtccacctggcacgctcccaggcccgcgacaagctggacaaatacgccattcagcagatgatggaggacaagctggcctgggagagacacacatttgaagagcggataagcagggctcctgagatcctggtgcggctgcgatcccacaccgtctgggagaggatgtctgtgaaactctgcttcaccgtgcaaggatttcccacgcccgtggtgcagtggtacaaagatggcagtctgatttgccaggcggctgaaccgggaaagtacaggattgagagcaactatggcgtacacacactggagatcaacagggcagactttgacgacactgcgacatactcagcagtggccaccaatgcccacggacaagtgtccaccaacgcggcggtggtggtgagaaggttccggggagacgaggaaccattccgttcggtgggactcccgattggattgcccctgtcatcgatgattccgtacacgcacttcgacgtccagtttttggagaagtttggggtcaccttcaggagggaaggcgagacggtcactctcaagtgcaccatgctggtgacgccggacctgaagcgggtgcagccgcgcgccgagtggtaccgcgatgacttgctgttgaaagagtccaagtggacgaagatgttctttggagaaggccaggcctccctgtccttcagccacctgcacaaggacgacgagggcctgtacaccctgcgcatcgtgtctcggggcggcgtcacggaccacagcgccttcctgtttgtcagagatgctgacccgctggtcacaggggcccccggtgcacccatggacttgcagtgccacgacgccaaccgggactacgtcatcgtgacctggaagccgcccaacaccaccactgagagccccgtcatgggctattttgtggaccgatgtgaagtaggaacgaataattgggtgcagtgcaatgatgcaccggtgaaaatctgcaaatacccggtcacagggctttttgaaggaaggtcttacatattccgagtgagggcagtgaacagtgcgggcatcagccgaccctccagggtctctgatgcggtggctgcacttgaccccttggacctcagaaggttacaagccgttcatttggagggagagaaggagattgccatttatcaggatgaccttgaaggtgacgcccaggttccagggcctcccaccggtgtgcacgcttccgagatcagcagaaactatgtcgtcctcagctgggagccacccactccccgtggcaaggacccgctcatgtacttcattgagaagtcggtggtggggagcggcacgtggcagagagtcaacgcccagacggctgtgagatccccgagatatgccgtgtttgacctcatggaagggaagtcttatgtgttccgagtgctgtcagcaaaccggcatggcctgagcgaaccttcggagataacgtcccccattcaggcccaggatgtgaccgttgtcccttctgctccgggtcgggttcttgcttcccgaaacaccaagacgtcggtggtggtgcagtgggaccgacctaagcatgaggaggacctgctgggctactacgtggactgctgtgtggccggaaccaacctctgggagccctgcaaccacaagcccatcggatacaacaggttcgtggtgcacggcttaaccacgggagagcagtacatcttccgagtcaaggcggtcaatgctgtggggatgagtgaaaattcccaggaatcagacgtcataaaagtgcaggccgcactcaccgtcccgtcccatccttatgggattacgctcctcaactgtgacggccactccatgaccctcggctggaaggtcccgaaattcagtggtggctcgcccatcctgggctactacctggacaagcgtgaagttcaccataaaaactggcacgaggtcaattcctcacccagcaaaccgacaatcctaacggtggacggcttgacggaaggctcactctacgagttcaaaatcgccgccgtcaacctggccggcatcggggagccctcagatcccagtgagcacttcaagtgtgaggcctggaccatgccggagcccggtcctgcctacgacttgacgttctgtgaggtcagggacacgtccttggtcatgctgtggaaggcccctgtgtactccggcagcagccctgtttctggatatttcgtggacttcagggaggaggatgctggagagtggatcactgtcgatcagacgacaacagccagccgttatttaaaggtctctgacctgcagcaaggtaagacctatgtcttcagggtccgggcagtcaatgcaaatggcgtggggaagccctcagacacgtcggagcctgtgctggtagaggcgagaccaggcaccaaggaaatcagtgctggtgtcgatgaacagggcaacatctatctgggcttcgactgccaggaaatgacagacgcgtctcagttcacctggtgtaaatcctacgaggagatttcagatgatgagaggtttaaaatcgaaaccgtgggggatcactccaagctgtacttaaagaatccggataaggaggatttagggacttactccgtgtctgtaagtgatacagacggagtgtcctccagttttgttctggacccagaagagctcgagcgtttgatggcattgagcaatgaaataaagaaccccacaattcctctgaaatcggaattagcttatgagatttttgataaggggcgggttcgcttctggctccaggctgagcacttatcaccagatgccagctaccgatttattattaatgacagagaagtctctgacagcgagatacacagaattaaatgtgacaaagctactggcattattgagatggtgatggatcgatttagtattgaaaatgaggggacctacactgtgcagattcatgatgggaaagccaaaagtcagtcttctctagttcttattggagatgcattcaagactgtgctggaagaggctgagtttcaaaggaaagaatttctcaggaaacaaggccctcattttgctgagtacttgcactgggatgtcacggaagaatgtgaagttcgacttgtttgcaaggttgcaaacaccaagaaagaaaccgttttcaaatggctcaaggatgatgctctgtatgaaacggagacactgcctaacctggagaggggaatctgtgagctcctcatcccaaagttgtcaaagaaggaccacggtgaatacaaggcaaccttgaaagatgacagaggccaagatgtgtccatccttgaaatagctggcaaagtgtatgatgatatgattttggcaatgagtagagtctgtgggaaatctgcttcgccactgaaggtactctgcaccccagaaggaatacgacttcagtgtttcatgaagtattttacagacgaaatgaaagtgaactggtgtcacaaagatgctaagatctcatccagtgagcatatgagaatcggggggagtgaagagatggcttggctgcagatatgtgagccgactgagaaggataaaggaaaatacacttttgagattttcgatggcaaagacaaccatcaacgctcccttgacctgtccggacaagcttttgatgaagcatttgcagaattccagcaattcaaagctgctgcttttgcagagaagaatcgtggcaggttgatcggcggcttgcctgacgtggtgaccatcatggaagggaagaccttgaatctgacctgcacggtgtttggaaaccctgaccccgaagtgatttggttcaagaacgaccaggacatccagctcagcgagcacttctcggtgaaggtggagcaggccaagtacgtcagcatgaccatcaaaggcgtgacctccgaggactcgggcaagtacagcatcaacatcaagaataagtatggcggggagaagatcgacgtgacggtgagcgtgtacaaacacggggagaagatcccggacatggccccgccccagcaagccaagcccaagctcatccccgcgtctgcctcagcggcaggccagtgaaggcgttttcctagcctggagatgggaaaatatgcttggcagagacaggaatgctgtgtgcttgttccaaatgagcagctggcatccgagtggtgtcctgtgtgggctgatagttgatcacacattgtgcttttgatttttgcatttggtgatgaatattttatacccgtctaagggagaaagctaatgttttccacaagactgaacaacgtgtatttacacgagggtagacggcagatgcctgacagagagtgggttggcagacaacacactagcattttcacgggtgtgggcacatgggtgtggcacctggacgtgtgcagcatgtggcggtctctgtgtgaagccaccgtgcttctctttggggggccgcgagatctagcatctctgaaatcctggctgtcgaggctttgaagcatgtgttacctggttaagcttgttttctcttgctttaggcaaataaaagtttaaaaatcaaaaaaaaaaaaaaaaa

SEQ ID NO: 219 - protein, 1465 aa, Homo sapiens
MSLVTVPFYQKRHRHFDQSYRNIQTRYLLDEYASKKRASTQASSQKSLSQRSSSQRASSQTSLGGTICRVCAKRVSTQEDEEQENRSRYQSLVAAYGEAKRHGFLSELAHLEEDVHLARSQARDKLDKYAIQQMMEDKLAWERHTFEERISRAPEILVRLRSHTVWERMSVKLCFTVQGFPTPVVQWYKDGSLICQAAEPGKYRIESNYGVHTLEINRADFDDTATYSAVATNAHGQVSTNAAVVVRRFRGDEEPFRSVGLPIGLPLSSMIPYTHFDVQFLEKFGVTFRREGETVTLKCTMLVTPDLKRVQPRAEWYRDDLLLKESKWTKMFFGEGQASLSFSHLHKDDEGLYTLRIVSRGGVTDHSAFLFVRDADPLVTGAPGAPMDLQCHDANRDYVIVTWKPPNTTTESPVMGYFVDRCEVGTNNWVQCNDAPVKICKYPVTGLFEGRSYIFRVRAVNSAGISRPSRVSDAVAALDPLDLRRLQAVHLEGEKEIAIYQDDLEGDAQVPGPPTGVHASEISRNYVVLSWEPPTPRGKDPLMYFIEKSVVGSGTWQRVNAQTAVRSPRYAVFDLMEGKSYVFRVLSANRHGLSEPSEITSPIQAQDVTVVPSAPGRVLASRNTKTSVVVQWDRPKHEEDLLGYYVDCCVAGTNLWEPCNHKPIGYNRFVVHGLTTGEQYIFRVKAVNAVGMSENSQESDVIKVQAALTVPSHPYGITLLNCDGHSMTLGWKVPKFSGGSPILGYYLDKREVHHKNWHEVNSSPSKPTILTVDGLTEGSLYEFKIAAVNLAGIGEPSDPSEHFKCEAWTMPEPGPAYDLTFCEVRDTSLVMLWKAPVYSGSSPVSGYFVDFREEDAGEWITVDQTTTASRYLKVSDLQQGKTYVFRVRAVNANGVGKPSDTSEPVLVEARPGTKEISAGVDEQGNIYLGFDCQEMTDASQFTWCKSYEEISDDERFKIETVGDHSKLYLKNPDKEDLGTYSVSVSDTDGVSSSFVLDPEELERLMALSNEIKNPTIPLKSELAYEIFDKGRVRFWLQAEHLSPDASYRFIINDREVSDSEIHRIKCDKATGIIEMVMDRFSIENEGTYTVQIHDGKAKSQSSLVLIGDAFKTVLEEAEFQRKEFLRKQGPHFAEYLHWDVTEECEVRLVCKVANTKKETVFKWLKDDALYETETLPNLERGICELLIPKLSKKDHGEYKATLKDDRGQDVSILEIAGKVYDDMILAMSRVCGKSASPLKVLCTPEGIRLQCFMKYFTDEMKVNWCHKDAKISSSEHMRIGGSEEMAWLQICEPTEKDKGKYTFEIFDGKDNHQRSLDLSGQAFDEAFAEFQQFKAAAFAEKNRGRLIGGLPDVVTIMEGKTLNLTCTVFGNPDPEVIWFKNDQDIQLSEHFSVKVEQAKYVSMTIKGVTSEDSGKYSINIKNKYGGEKIDVTVSVYKHGEKIPDMAPPQQAKPKLIPASASAAGQ

SEQ ID NO: 220 - DNA, 4135 bp, Homo sapiens
ctcacagcccagcacctgcggagggagcgctgaccatggctccctggcctgaattgggagatgcccagcccaaccccgataagtacctcgaaggggccgcaggtcagcagcccactgcccctgataaaagcaaagagaccaacaaaaataacactgaggcacctgtaaccaagattgaacttctgccgtcctactccacggctacactgatagatgagcccactgaggtggatgacccctggaacctacccactcttcaggactcggggatcaagtggtcagagagagacaccaaagggaagattctctgtttcttccaagggattgggagattgattttacttctcggatttctctactttttcgtgtgctccctggatattcttagtagcgccttccagctggttggaggaaaaatggcaggacagttcttcagcaacagctctattatgtccaaccctttgttggggctggtgatcggggtgctggtgaccgtcttggtgcagagctccagcacctcaacgtccatcgttgtcagcatggtgtcctcttcattgctcactgttcgggctgccatccccattatcatgggggccaacattggaacgtcaatcaccaacactattgttgcgctcatgcaggtgggagatcggagtgagttcagaagagcttttgcaggagccactgtccatgacttcttcaactggctgtccctgttggtgctcttgcccgtggaggtggccacccattacctcgagatcataacccagcttatagtggagagcttccacttcaagaatggagaagatgccccagatcttctgaaagtcatcactaagcccttcacaaagctcattgtccagctggataaaaaagttatcagccaaattgcaatgaacgatgaaaaagcgaaaaacaagagtcttgtcaagatttggtgcaaaacttttaccaacaagacccagattaacgtcactgttccctcgactgctaactgcacctccccttccctctgttggacggatggcatccaaaactggaccatgaagaatgtgacctacaaggagaacatcgccaaatgccagcatatctttgtgaatttccacctcccggatcttgctgtgggcaccatcttgctcatactctccctgctggtcctctgtggttgcctgatcatgattgtcaagatcctgggctctgtgctcaaggggcaggtcgccactgtcatcaagaagaccatcaacactgatttcccctttccctttgcatggttgactggctacctggccatcctcgtcggggcaggcatgaccttcatcgtacagagcagctctgtgttcacgtcggccttgacccccctgattggaatcggcgtgataaccattgagagggcttatccactcacgctgggctccaacatcggcaccaccaccaccgccatcctggccgccttagccagccctggcaatgcattgaggagttcactccagatcgccctgtgccactttttcttcaacatctccggcatcttgctgtggtacccgatcccgttcactcgcctgcccatccgcatggccaaggggctgggcaacatctctgccaagtatcgctggttcgccgtcttctacctgatcatcttcttcttcctgatcccgctgacggtgtttggcctctcgctggccggctggcgggtgctggttggtgtcggggttcccgtcgtcttcatcatcatcctggtactgtgcctccgactcctgcagtctcgctgcccacgcgtcctgccgaagaaactccagaactggaacttcctgccgctgtggatgcgctcgctgaagccctgggatgccgtcgtctccaagttcaccggctgcttccagatgcgctgctgctgctgctgccgcgtgtgctgccgcgcgtgctgcttgctgtgtggctgccccaagtgctgccgctgcagcaagtgctgcgaggacttggaggaggcgcaggaggggcaggatgtccctgtcaaggctcctgagacctttgataacataaccattagcagagaggctcagggtgaggtccctgcctcggactcaaagaccgaatgcacggccttgtaggggacgccccagattgtcagggatggggggatggtccttgagttttgcatgctctcctccctcccacttctgcaccctttcaccacctcgaggagatttgctccccattagcgaatgaaattgatgcagtcctacctaactcgattccctttggcttggtgggtaggcctgcagggcacttttattccaacccctggtcactcagtaatcttttactccaggaaggcacaggatggtacctaaagagaattagagaatgaacctggcgggacggatgtctaatcctgcacctagctgggttggtcagtagaacctattttcagactcaaaaaccatcttcagaaagaaaaggcccagggaaggaatgtatgagaggctctcccagatgaggaagtgtactctctatgactatcaagctcaggcctctccctttttttaaaccaaagtctggcaaccaagagcagcagctccatggcctccttgccccagatcagcctgggtcaggggacatagtgtcattgtttggaaactgcagaccacaaggtgtgggtctatcccacttcctagtgctccccacattccccatcagggcttcctcacgtggacaggtgtgctagtccaggcagttcacttgcagtttccttgtcctcatgcttcggggatgggagccacgcctgaactagagttcaggctggatacatgtgctcacctgctgctcttgtcttcctaagagacagagagtggggcagatggaggagaagaaagtgaggaatgagtagcatagcattctgccaaaagggccccagattcttaatttagcaaactaagaagcccaattcaaaagcattgtggctaaagtctaacgctcctctcttggtcagataacaaaagccctccctgttggatcttttgaaataaaacgtgcaagttatccaggctcgtagcctgcatgctgccaccttgaatcccagggagtatctgcacctggaatagctctccacccctctctgcctccttactttctgtgcaagatgatttcctgggttaacttccttctttccatccacccacccactggaatctctttccaaacatttttccattttcccacagatgggctttgattagctgtcctctctccatgcctgcaaagctccagatttttggggaaagctgtacccaactggactgcccagtgaactgggatcattgagtacagtcgagcacacgtgtgtgcatgggtcaaaggggtgtgttccttctcatcctagatgccttctctgtgccttccacagcctcctgcctgattacaccactgcccccgccccaccctcagccatcccaattcttcctggccagtgcgctccagccttatctaggaaaggaggagtgggtgtagccgtgcagcaagattggggcctcccccatcccagcttctccaccatcccagcaagtcaggatatcagacagtcctcccctgaccctcccccttgtagatatcaattcccaaacagagccaaatactctatatctatagtcacagccctgtacagcatttttcataagttatatagtaaatggtctgcatgatttgtgcttctagtgctctcatttggaaatgaggcaggcttcttctatgaaatgtaaagaaagaaaccactttgtatattttgtaataccacctctgtggccatgcctgccccgcccactctgtatatatgtaagttaaacccgggcaggggctgtggccgtctttgtactctggtgatttttaaaaattgaatctttgtacttgcattgattgtataataattttgagaccaggtctcgctgtgttgctcaggctggtctcaaactcctgagatcaagcaatccgcccacctcagcctcccaaagtgctgagatcacaggcgtgagccaccaccaggcctgattgtaatttttttttttttttttactggttatgggaagggagaaataaaatcatcaaaccccaaaaaaaaaaaaaaaaaaaaaaaaaaaaaaaaaaa

SEQ ID NO: 221 - protein, 689 aa, Homo sapiens [sequence omitted]

SEQ ID NO: 222 - DNA, 771 bp, Homo sapiens
gccgctgagccataatggagatatcaatgcctccacctcagatatatgtagaaaaaactctggccattatcaaaccagatattgttgacaaagaggaggagatacaagatattattcttagatccggattcaccattgttcagagaagaaaactacgcctcagccctgagcaatgtagtaacttttatgtggaaaagtatggaaaaatgtttttccccaacttaacagcttacatgagttctggaccacttgtcgccatgatattagctagacataaagccatctcttattggttagaacttttgggaccaaataatagcttagtagcgaaggagacacatccagacagtctgagggcaatttatggcacagatgacctaaggaatgcacttcatgggagtaatgactttgctgctgcggaaagagaaatacgttttatgtttcctgaagtgattgttgagcccattccaattggacaagctgctaaggactatttaaatttacatataatgccaactctgcttgaaggactcacagagctttgtaagcaaaaaccagcagaccctttgatttggctagctgattggctgctgaaaaataatcctaacaaacccaaactttgtcaccatccaattgtagaagaaccttattaaaaaaaaaatcctcgaaagaacaaatcatgaactatcttattataaaaggctgtacttctactgtttgagaaaattatttctagggtttaagtaactaccagtaaaataaatttatttc

SEQ ID NO: 223 - protein, 212 aa, Homo sapiens
MEISMPPPQIYVEKTLAIIKPDIVDKEEEIQDIILRSGFTIVQRRKLRLSPEQCSNFYVEKYGKMFFPNLTAYMSSGPLVAMILARHKAISYWLELLGPNNSLVAKETHPDSLRAIYGTDDLRNALHGSNDFAAAEREIRFMFPEVIVEPIPIGQAAKDYLNLHIMPTLLEGLTELCKQKPADPLIWLADWLLKNNPNKPKLCHHPIVEEPY

SEQ ID NO: 224 - DNA, 3463 bp, Homo sapiens
atggctgagccgactagtgatttcgagactcctatcgggtggcatgcgtctcccgagctgactcccacgttagggcccctgagcgacactgccccgccgcgggacaggtggatgttctgggcaatgctgccgccaccgccaccaccacttacgtcctcgcttcccgcagccgggtcaaagccttcctctgagtcgcagccccccatggaggcccagtctctccccggggctccgccccccttcgacgcccagattcttcccggggcgcaaccccccttcgacgcccagtctccccttgattctcagcctcaacccagcggccagccttggaatttccatgcttccacatcgtggtattggagacagtcttctgataggtttcctcggcatcagaagtccttcaaccctgcagttaaaaattcttattatccacgaaagtatgatgcaaaattcacagacttcagcttacctcccagtagaaaacagaaaaaaaagaaaagaaaggaaccagtttttcactttttttgtgatacctgtgatcgtggttttaaaaatcaagaaaagtatgacaaacacatgtctgaacatacaaaatgccctgaattagattgctcttttactgcacacgagaagattgtccagttccattggagaaatatgcatgctcctggcatgaagaagatcaagttagacactccagaggaaattgcacggtggagggaagaaagaaggaaaaactatccaactctggccaatattgaaaggaagaagaagttaaaacttgaaaaggagaagagaggagcagtattgacaacaacacaatatggcaagatgaaggggatgtccagacattcacaaatggcaaagatcagaagtcctggcaagaatcacaaatggaaaaacgacaattctagacagagagcagtcactggatcaggcagtcacttgtgtgatttgaagctagaaggtccaccggaggcaaatgcagatcctcttggtgttttgataaacagtgattctgagtctgataaggaggagaaaccacaacattctgtgatacccaaggaagtgacaccagccctatgctcactaatgagtagctatggcagtctttcagggtcagagagtgagccagaagaaactcccatcaagactgaagcagacgttttggcagaaaaccaggttcttgatagcagtgctcctaagagtccaagtcaagatgttaaagcaactgttagaaatttttcagaagccaagagtgagaaccgaaagaaaagctttgaaaaaacaaaccctaagaggaaaaaagattatcacaactatcaaacgttattcgaaccaagaacacaccatccatatctcttggaaatgcttctagctccggacattcgacatgaaagaaatgtgattttgcagtgtgttcggtacatcattaaaaaagacttttttggactggatactaattctgcgaaaagtaaagatgtataggcatctggtgtttcagcatacataactgaagcatgtgaaacagtatcatcctcgttagtagaggaaaaccaaaacccttttttccgtcaaaattggatttgtaattaaattgtaagcctcgtaggatgtatgttggaattttaagtctttcctttggttctatgcaaataaaaaaataactgattttttaagactgtgtctgtattgttgggattgaatctagtatttgctgggagaattttttctttgtatttattttaatgtattgttctcatgtaagaatgactgatgttgtgttagttaagaattgaagataggtttagcagtaaagaagaaagcttttaaaaggattgattcagctaagcaaagttgggcagagaaatacagccattttgtttttaatgcagaaaaggaagatgttctgtagcaagggggaatattttaaaaataaaccagatcaaattaatacaatcagaaggtttcgaaatgtaaatattccttatttaagacatgtttaaattcacctactagcacgacttacatagctcaaatattgaatgtttaaaatattaatacagatggggcctctttatgtttagataaaattgaagtacttaattgaagctttttaaaaattgtaaagtaaatgaaagctattgagatctttttgtctcctataataccagggaatttgagcttgtgttctagtcattgtactagctgtagctattggtctgtccttttgacatacagctaaaagggactaaatttgtaaaaaattagtttgttatagttgaagattaacttttcctaacattgtgattattgaagttcatgaatcttgctgtcaaggaagaaaggtaagaaagctgatagctcctccatgttggtaaaatcctctccagaatcttggaacacctggcatgtgaccctagtgacgtcacagacctgagatgaagattcatgtttagccagtgttttccagccttgtacccaccatacagatctgtttattctgtttcaccctactcctccagtgagccccatattttgggaaattatctgccttatacattaactaattcaattcatgtaacactgttgagtgcttactctttgtacctctattgtgcctatattaaaggtatacaaataaataaggccatgtctgacttcaaggaactcagtttaattttgatatattcaaagatgtgattcccaaccaactcaggatgaagtaactagtgttacaactgagttgatattctaaaatataacccagtttgtacttttattactagttagcatacacattttatggcttatgggttaataaatgaattcatggactcctggactactttcattgatgaccatatctccagggatgttgttgatccccacactgccttaaggtatattatagaaacagttttattttccatttttcttgtttcctgataataaatgtatttaggactgaaaatactcctgagtactcccctggctgtatgtctgacagtctttagctatggtgactattgtttatttttaatgggtatttcagattccaagtgtatttaaaatttctaaggagatataatatagcctgtatggtttctactttatggaattatatggtcaatatttgtaaatattctatgagttttgggtgggtagaggggtgctttgcctgttttgggtacaggtttttttggatttagcttgttaattgttcaaactttctgccttctacattcctatcttattgttcgtttaatcagtttctgaaatgtaagcattacatgactattggtgagttgtgccttttataactgaaatactttactttttctcatatcctctataattgacttctattttccttaatcaaaccagctctgggaaatttaatacatttatattaattgagattattaaaacatttggactattaaaaaaaaaaaaaaaaaaa

SEQ ID NO: 225 - protein, 495 aa, Homo sapiens
MAEPTSDFETPIGWHASPELTPTLGPLSDTAPPRDRWMFWAMLPPPPPPLTSSLPAAGSKPSSESQPPMEAQSLPGAPPPFDAQILPGAQPPFDAQSPLDSQPQPSGQPWNFHASTSWYWRQSSDRFPRHQKSFNPAVKNSYYPRKYDAKFTDFSLPPSRKQKKKKRKEPVFHFFCDTCDRGFKNQEKYDKHMSEHTKCPELDCSFTAHEKIVQFHWRNMHAPGMKKIKLDTPEEIARWREERRKNYPTLANIERKKKLKLEKEKRGAVLTTTQYGKMKGMSRHSQMAKIRSPGKNHKWKNDNSRQRAVTGSGSHLCDLKLEGPPEANADPLGVLINSDSESDKEEKPQHSVIPKEVTPALCSLMSSYGSLSGSESEPEETPIKTEADVLAENQVLDSSAPKSPSQDVKATVRNFSEAKSENRKKSFEKTNPKRKKDYHNYQTLFEPRTHHPYLLEMLLAPDIRHERNVILQCVRYIIKKDFFGLDTNSAKSKDV

SEQ ID NO: 226 - DNA, 942 bp, Homo sapiens
atgagaattgcagtgatttgcttttgcctcctaggcatcacctgtgccataccagttaaacaggctgattctggaagttctgaggaaaagcagctttacaacaaatacccagatgctgtggccacatggctaaaccctgacccatctcagaagcagaatctcctagccccacagaatgctgtgtcctctgaagaaaccaatgactttaaacaagagacccttccaagtaagtccaacgaaagccatgaccacatggatgatatggatgatgaagatgatgatgaccatgtggacagccaggactccattgactcgaacgactctgatgatgtagatgacactgatgattctcaccagtctgatgagtctcaccattctgatgaatctgatgaactggtcactgattttcccacggacctgccagcaaccgaagttttcactccagttgtccccacagtagacacatatgatggccgaggtgatagtgtggtttatggactgaggtcaaaatctaagaagtttcgcagacctgacatccagtaccctgatgctacagacgagcacatcacctcacacatggaaagcgaggagttgaatggtgcatacaaggccatccccgttgcccaggacctgaacgcgccttctgattgggacagccgtgggaaggacagttatgaaacgagtcagctggatgaccagagtgctgaagcccacagccacaagcagtccagattatataagcggaaagctaatgatgagagcaatgagcattccgatgtgattgatagtcaggaactttccaaagtcagccgtgaattccacagccatgaatttcacagccatgaagatatgctggttgtagaccccaaaagtaaggaagaagataaacacctgaaatttcgtatttctcatgaattagatagtgcatcttctgaggtcaat

SEQ ID NO: 227 - protein, 314 aa, Homo sapiens
MRIAVICFCLLGITCAIPVKQADSGSSEEKQLYNKYPDAVATWLNPDPSQKQNLLAPQNAVSSEETNDFKQETLPSKSNESHDHMDDMDDEDDDDHVDSQDSIDSNDSDDVDDTDDSHQSDESHHSDESDELVTDFPTDLPATEVFTPVVPTVDTYDGRGDSVVYGLRSKSKKFRRPDIQYPDATDEHITSHMESEELNGAYKAIPVAQDLNAPSDWDSRGKDSYETSQLDDQSAEAHSHKQSRLYKRKANDESNEHSDVIDSQELSKVSREFHSHEFHSHEDMLVVDPKSKEEDKHLKFRISHELDSASSEVN

SEQ ID NO: 228 - DNA, 1524 bp, Homo sapiens
gcagagcacagcatcgtcgggaccagactcgtctcaggccagttgcagccttctcagccaaacgccgaccaaggaaaactcactaccatgagaattgcagtgatttgcttttgcctcctaggcatcacctgtgccataccagttaaacaggctgattctggaagttctgaggaaaagcagctttacaacaaatacccagatgctgtggccacatggctaaaccctgacccatctcagaagcagaatctcctagccccacagacccttccaagtaagtccaacgaaagccatgaccacatggatgatatggatgatgaagatgatgatgaccatgtggacagccaggactccattgactcgaacgactctgatgatgtagatgacactgatgattctcaccagtctgatgagtctcaccattctgatgaatctgatgaactggtcactgattttcccacggacctgccagcaaccgaagttttcactccagttgtccccacagtagacacatatgatggccgaggtgatagtgtggtttatggactgaggtcaaaatctaagaagtttcgcagacctgacatccagtaccctgatgctacagacgaggacatcacctcacacatggaaagcgaggagttgaatggtgcatacaaggccatccccgttgcccaggacctgaacgcgccttctgattgggacagccgtgggaaggacagttatgaaacgagtcagctggatgaccagagtgctgaaacccacagccacaagcagtccagattatataagcggaaagccaatgatgagagcaatgagcattccgatgtgattgatagtcaggaactttccaaagtcagccgtgaattccacagccatgaatttcacagccatgaagatatgctggttgtagaccccaaaagtaaggaagaagataaacacctgaaatttcgtatttctcatgaattagatagtgcatcttctgaggtcaattaaaaggagaaaaaatacaatttctcactttgcatttagtcaaaagaaaaaatgctttatagcaaaatgaaagagaacatgaaatgcttctttctcagtttattggttgaatgtgtatctatttgagtctggaaataactaatgtgtttgataattagtttagtttgtggcttcatggaaactccctgtaaactaaaagcttcagggttatgtctatgttcattctatagaagaaatgcaaactatcactgtattttaatatttgttattctctcatgaatagaaatttatgtagaagcaaacaaaatacttttacccacttaaaaagagaatataacattttatgtcactataatcttttgttttttaagttagtgtatattttgttgtgattatctttttgtggtgtgaataaatcttttatcttgaatgtaataagaatttggtggtgtcaattgcttatttgttttcccacggttgtccagcaattaataaaacataaccttttttactgcctaaaaaaaaaaaaaaaaaaaa

SEQ ID NO: 229 - protein, 300 aa, Homo sapiens
MRIAVICFCLLGITCAIPVKQADSGSSEEKQLYNKYPDAVATWLNPDPSQKQNLLAPQTLPSKSNESHDHMDDMDDEDDDDHVDSQDSIDSNDSDDVDDTDDSHQSDESHHSDESDELVTDFPTDLPATEVFTPVVPTVDTYDGRGDSVVYGLRSKSKKFRRPDIQYPDATDEDITSHMESEELNGAYKAIPVAQDLNAPSDWDSRGKDSYETSQLDDQSAETHSHKQSRLYKRKANDESNEHSDVIDSQELSKVSREFHSHEFHSHEDMLVVDPKSKEEDKHLKFRISHELDSASSEVN

SEQ ID NO: 230 - DNA, 861 bp, Homo sapiens
atgagaattgcagtgatttgcttttgcctcctaggcatcacctgtgccataccagttaaacaggctgattctggaagttctgaggaaaagcagaatgctgtgtcctctgaagaaaccaatgactttaaacaagagacccttccaagtaagtccaacgaaagccatgaccacatggatgatatggatgatgaagatgatgatgaccatgtggacagccaggactccattgactcgaacgactctgatgatgtagatgacactgatgattctcaccagtctgatgagtctcaccattctgatgaatctgatgaactggtcactgattttcccacggacctgccagcaaccgaagttttcactccagttgtccccacagtagacacatatgatggccgaggtgatagtgtggtttatggactgaggtcaaaatctaagaagtttcgcagacctgacatccagtaccctgatgctacagacgagcacatcacctcacacatggaaagcgaggagttgaatggtgcatacaaggccatccccgttgcccaggacctgaacgcgccttctgattgggacagccgtgggaaggacagttatgaaacgagtcagctggatgaccagagtgctgaagcccacagccacaagcagtccagattatataagcggaaagctaatgatgagagcaatgagcattccgatgtgattgatagtcaggaactttccaaagtcagccgtgaattccacagccatgaatttcacagccatgaagatatgctggttgtagaccccaaaagtaaggaagaagataaacacctgaaatttcgtatttctcatgaattagatagtgcatcttctgaggtcaat

SEQ ID NO: 231 - protein, 287 aa, Homo sapiens
MRIAVICFCLLGITCAIPVKQADSGSSEEKQNAVSSEETNDFKQETLPSKSNESHDHMDDMDDEDDDDHVDSQDSIDSNDSDDVDDTDDSHQSDESHHSDESDELVTDFPTDLPATEVFTPVVPTVDTYDGRGDSVVYGLRSKSKKFRRPDIQYPDATDEHITSHMESEELNGAYKAIPVAQDLNAPSDWDSRGKDSYETSQLDDQSAEAHSHKQSRLYKRKANDESNEHSDVIDSQELSKVSREFHSHEFHSHEDMLVVDPKSKEEDKHLKFRISHELDSASSEVN

SEQ ID NO: 232 - DNA, 838 bp, Homo sapiens
ctcagagccacccacagccgcagccatgctgtgcctcctgctcaccctgggcgtggccctggtctgtggtgtcccggccatggacatcccccagaccaagcaggacctggagctcccaaagttggcagggacctggcactccatggccatggcgaccaacaacatctccctcatggcgacactgaaggcccctctgagggtccacatcacctcactgttgcccacccccgaggacaacctggagatcgttctgcacagatgggagaacaacagctgtgttgagaagaaggtccttggagagaagactgagaatccaaagaagttcaagatcaactatacggtggcgaacgaggccacgctgctcgatactgactacgacaatttcctgtttctctgcctacaggacaccaccacccccatccagagcatgatgtgccagtacctggccagagtcctggtggaggacgatgagatcatgcagggattcatcagggctttcaggcccctgcccaggcacctatggtacttgctggacttgaaacagatggaagagccgtgccgtttctaggtgagctcctgcctggtcctgcctcctggctcacctccgcctccaggaagaccagactcccacccttccacacctccagagcagtgggacttcctcctgccctttcaaagaataaccacagctcagaagacgatgacgtggtcatctgtgtcgccatccccttcctgctgcacacctgcaccacggccatggggaggctgctccctgggggcagagtctctggcagaggttattaataaacccttggagcatgaaaaaaaaaaaaaaaaa

SEQ ID NO: 233 - protein, 180 aa, Homo sapiens
MLCLLLTLGVALVCGVPAMDIPQTKQDLELPKLAGTWHSMAMATNNISLMATLKAPLRVHITSLLPTPEDNLEIVLHRWENNSCVEKKVLGEKTENPKKFKINYTVANEATLLDTDYDNFLFLCLQDTTTPIQSMMCQYLARVLVEDDEIMQGFIRAFRPLPRHLWYLLDLKQMEEPCRF

SEQ ID NO: 234 - DNA, 851 bp, Homo sapiens
ggctccagagctcagagccacccacagccgcagccatgctgtgcctcctgctcaccctgggcgtggccctggtctgtggtgtcccggccatggacatcccccagaccaagcaggacctggagctcccaaagttggcagggacctggcactccatggccatggcgaccaacaacatctccctcatggcgacactgaaggcccctctgagggtccacatcacctcactgttgcccacccccgaggacaacctggagatcgttctgcacagatgggagaacaacagctgtgttgagaagaaggtccttggagagaagactgagaatccaaagaagttcaagatcaactatacggtggcgaacgaggccacgctgctcgatactgactacgacaatttcctgtttctctgcctacaggacaccaccacccccatccagagcatgatgtgccagtacctggccagagtcctggtggaggacgatgagatcatgcagggattcatcagggctttcaggcccctgcccaggcacctatggtacttgctggacttgaaacagatggaagagccgtgccgtttctaggtgagctcctgcctggtcctgcctcctgggtgacctgtaaacccaacagctcacctccgcctccaggaagaccagactcccacccttccacacctccagagcagtgggacttcctcctgccctttcaaagaataaccacagctcagaagacgatgacgtggtcatctgtgtcgccatccccttcctgctgcacacctgcaccacggccatggggaggctgctccctgggggcagagtctctggcagaggttattaataaacccttggagcatg

SEQ ID NO: 235 - DNA, 811 bp, Homo sapiens
catccctctggctccagagctcagagccacccacagccgcagccatgctgtgcctcctgctcaccctgggcgtggccctggtctgtggtgtcccggccatggacatcccccagaccaagcaggacctggagctcccaaagttggcagggacctggcactccatggccatggcgaccaacaacatctccctcatggcgacactgaaggcccctctgagggtccacatcacctcactgttgcccacccccgaggacaacctggagatcgttctgcacagatgggagaacaacagctgtgttgagaagaaggtccttggagagaagactgggaatccaaagaagttcaagatcaactatacggtggcgaacgaggccacgctgctcgatactgactacgacaatttcctgtttctctgcctacaggacaccaccacccccatccagagcatgatgtgccagtacctggccagagtcctggtggaggacgatgagatcatgcagggattcatcagggctttcaggcccctgcccaggcacctatggtacttgctggacttgaaacagatggaagagccgtgccgtttctagctcacctccgcctccaggaagaccagactcccacccttccacacctccagagcagtgggacttcctcctgccctttcaaagaataaccacagctcagaagacgatgacgtggtcatctgtgtcgccatccccttcctgctgcacacctgcaccattgccatggggaggctgctccctgggggcagagtctctggcagaggttattaataaacccttggagcatg

SEQ ID NO: 236 - DNA, 850 bp, Homo sapiens
catccctctggctccagagctcagagccacccacagccgcagccatgctgtgcctcctgctcaccctgggcgtggccctggtctgtggtgtcccggccatggacatcccccagaccaagcaggacctggagctcccaaagttggcagggacctggcactccatggccatggcgaccaacaacatctccctcatggcgacactgaaggcccctctgagggtccacatcacctcactgttgcccacccccgaggacaacctggagatcgttctgcacagatgggagaacaacagctgtgttgagaagaaggtccttggagagaagactgrgaatccaaagaagttcaagatcaactatacggtggcgaacgaggccacgctgctcgatactgactacgacaatttcctgtttctctgcctacaggacaccaccacccccatccagagcatgatgtgccagtacctggccagagtcctggtggaggacgatgagatcatgcagggattcatcagggctttcaggcccctgcccaggcacctatggtacttgctggacttgaaacagatggaagagccgtgccgtttctagtgacctgtaaacccaacagctcacctccgcctccaggaagaccagactcccacccttccacacctccagagcagtgggacttcctcctgccctttcaaagaataaccacagctcagaagacgatgacgtggtcatctgtgtcgccatccccttcctgctgcacacctgcaccacggccatggggaggctgctccctgggggcagagtctctggcagaggttattaataaacccttggagcatgaaaaaaaaaaaaaaaaaaaa

SEQ ID NO: 237 - DNA, 598 bp, Homo sapiens
catccctctggctccagagctcagagccacccacagccgcagccatgctgtgcctcctgctcaccctgggcgtggccctggtctgtggtgtcccggccatggacatcccccagaccaagcaggacctggagctcccaaaggacaccaccacccccatccagagcatgatgtgccagtacctggccagagtcctggtggaggacgatgagatcatgcagggattcatcagggctttcaggcccctgcccaggcacctatggtacttgctggacttgaaacagatggaagagccgtgccgtttctaggtgagctcctgcctggtcctgcctcctgggtgacctgtaaacccaacagctcacctccgcctccaggaagaccagactcccacccttccacacctccagagcagtgggacttcctcctgccctttcaaagaataaccacagctcagaagacgatgacgtggtcatctgtgtcgccatccccttcctgctgcacacctgcaccacggccatggggaggctgctccctgggggcagagtctctggcagaggttattaataaacccttggagcatgaaaaaaaaaaaaaaaaaaaa

SEQ ID NO: 238 - protein, 86 aa, Homo sapiens
MLCLLLTLGVALVCGVPAMDIPQTKQDLELPKDTTTPIQSMMCQYLARVLVEDDEIMQGFIRAFRPLPRHLWYLLDLKQMEEPCRF

SEQ ID NO: 239 - DNA, 814 bp, Homo sapiens
catccctctggctccagagctcagagccacccacagccgcagccatgctgtgcctcctgctcaccctgggcgtggccctggtctgtggtgtcccggccatggacatcccccagaccaagcaggacctggagacactgaaggcccctctgagggtccacatcacctcactgttgcccacccccgaggacaacctggagatcgttctgcacagatgggagaacaacagctgtgttgagaagaaggtccttggagagaagactgrgaatccaaagaagttcaagatcaactatacggtggcgaacgaggccacgctgctcgatactgactacgacaatttcctgtttctctgcctacaggacaccaccacccccatccagagcatgatgtgccagtacctggccagagtcctggtggaggacgatgagatcatgcagggattcatcagggctttcaggcccctgcccaggcacctatggtacttgctggacttgaaacagatggaagagccgtgccgtttctaggtgagctcctgcctggtcctgcctcctgggtgacctgtaaacccaacagctcacctccgcctccaggaagaccagactcccacccttccacacctccagagcagtgggacttcctcctgccctttcaaagaataaccacagctcagaagacgatgacgtggtcatctgtgtcgccatccccttcctgctgcacacctgcaccacggccatggggaggctgctccctgggggcagagtctctggcagaggttattaataaacccttggagcatgaaaaaaaaaaaaaaaaaaaa

SEQ ID NO: 240 - protein, 158 aa, Homo sapiens
MLCLLLTLGVALVCGVPAMDIPQTKQDLELPKAPLRVHITSLLPTPEDNLEIVLHRWENNSCVEKKVLGEKTENPKKFKINYTVANEATLLDTDYDNFLFLCLQDTTTPIQSMMCQYLARVLVEDDEIMQGFIRAFRPLPRHLWYLLDLKQMEEPCRF

SEQ ID NO: 241 - protein, 158 aa, Homo sapiens
MLCLLLTLGVALVCGVPAMDIPQTKQDLETLKAPLRVHITSLLPTPEDNLEIVLHRWENNSCVEKKVLGEKTENPKKFKINYTVANEATLLDTDYDNFLFLCLQDTTTPIQSMMCQYLARVLVEDDEIMQGFIRAFRPLPRHLWYLLDLKQMEEPCRF

SEQ ID NO: 242 - DNA, 2707 bp, Homo sapiens
ggcacgaggcttcagaaggaggagagacaccgggcccagggcaccctcgcgggcggacccaagcagtgagggcctgcagccggccggccagggcagcggcaggcgcggcccggacctacgggaggaagccccgagccctcggcgggctgcgagcgactccccggcgatgcctcacaactccatcagatctggccatggagggctgaaccagctgggaggggcctttgtgaatggcagacctctgccggaagtggtccgccagcgcatcgtagacctggcccaccagggtgtaaggccctgcgacatctctcgccagctccgcgtcagccatggctgcgtcagcaagatccttggcaggtactacgagactggcagcatccggcctggagtgatagggggctccaagcccaaggtggccacccccaaggtggtggagaagattggggactacaaacgccagaaccctaccatgtttgcctgggagatccgagaccggctcctggctgagggcgtctgtgacaatgacactgtgcccagtgtcagctccattaatagaatcatccggaccaaagtgcagcaaccattcaacctccctatggacagctgcgtggccaccaagtccctgagtcccggacacacgctgatccccagctcagctgtaactcccccggagtcaccccagtcggattccctgggctccacctactccatcaatgggctcctgggcatcgctcagcctggcagcgacaagaggaaaatggatgacagtgatcaggatagctgccgactaagcattgactcacagagcagcagcagcggaccccgaaagcaccttcgcacggatgccttcagccagcaccacctcgagccgctcgagtgcccatttgagcggcagcactacccagaggcctatgcctcccccagccacaccaaaggcgagcagggcctctacccgctgcccttgctcaacagcaccctggacgacgggaaggccaccctgaccccttccaacacgccactggggcgcaacctctcgactcaccagacctaccccgtggtggcagatcctcactcacccttcgccataaagcaggaaacccccgaggtgtccagttctagctccaccccttcctctttatctagctccgcctttttggatctgcagcaagtcggctccggggtcccgcccttcaatgcctttccccatgctgcctccgtgtacgggcagttcacgggccaggccctcctctcagggcgagagatggtggggcccacgctgcccggatacccaccccacatccccaccagcggacagggcagctatgcctcctctgccatcgcaggcatggtggcaggaagtgaatactctggcaatgcctatggccacaccccctactcctcctacagcgaggcctggcgcttccccaactccagcttgctgagttccccatattattacagttccacatcaaggccgagtgcaccgcccaccactgccacggcctttgaccatctgtagttgccatggggacagtgggagcgactgagcaacaggaggactcagcctgggacaggccccagagagtcacacaaaggaatctttatttattacatgaaaaataaccacaagtccagcattgcggcacactccctgtgtggttaatttaatgaaccatgaaagacaggatgaccttggacaaggccaaactgtcctccaagactccttaatgaggggcaggagtcccagggaaagagaaccatgccatgctgaaaaagacaaaattgaagaagaaatgtagcccccagccggtacccaccaaaggagagaagaagcaatagccgaggaacttggggggatggcgaatggttcctgcccgggcccaaggggtgcacagggcacctccatggctccattattaacacaactctagcaattatggaccataagcacttccctccagcccacaagtcacagcctggtgccgaggctctcctcaccagccacccagggagtcacctccctcagcctcccgcctgccccacacggaggctctggctgtcctctttctccactccatttgcttggctctttctacacctccctcttgggcatgggctgagggctggagcgagtccctcagaaattccaccaggctgtcagctgacctcttttgcctgctgctgtgaaggtatagcaccaccccaggtcctcctgcagtgcggcatccccttggcagctgccgtcagccaggccagccccagggagcttaaaacagacattccacagggcctgggcccctgggaggtgaggtgtggtgtgcggcttcacccagggcagaacaaggcagaatcgcaggaaacccgcttccccttcctgacagctcctgccaagccaaatgtgcttcctgcagctcacgcccaccagctactgaagggacccaaggcaccccctgaagccagcgatagagggtccctctctgctccccagcagctcctgcccccaaggcctgactgtatatactgtcaatgaaactttgtttgggtcaagcttccttctttctaccccccagactttggcctctgagtgaaatgtctctctttgccctgtggggcttctctccttgatgcttctttctttttttaaagacaacctgccattaccacatgactcaataaaccattgctcttcaaaaaaaaaaaaaaaaaa

SEQ ID NO: 243 - protein, 450 aa, Homo sapiens
MPHNSIRSGHGGLNQLGGAFVNGRPLPEVVRQRIVDLAHQGVRPCDISRQLRVSHGCVSKILGRYYETGSIRPGVIGGSKPKVATPKVVEKIGDYKRQNPTMFAWEIRDRLLAEGVCDNDTVPSVSSINRIIRTKVQQPFNLPMDSCVATKSLSPGHTLIPSSAVTPPESPQSDSLGSTYSINGLLGIAQPGSDKRKMDDSDQDSCRLSIDSQSSSSGPRKHLRTDAFSQHHLEPLECPFERQHYPEAYASPSHTKGEQGLYPLPLLNSTLDDGKATLTPSNTPLGRNLSTHQTYPVVADPHSPFAIKQETPEVSSSSSTPSSLSSSAFLDLQQVGSGVPPFNAFPHAASVYGQFTGQALLSGREMVGPTLPGYPPHIPTSGQGSYASSAIAGMVAGSEYSGNAYGHTPYSSYSEAWRFPNSSLLSSPYYYSSTSRPSAPPTTATAFDHL

SEQ ID NO: 244 - DNA, 2381 bp, Homo sapiens
  misc_feature (1)...(2381): n = A,T,C or G
gaattcggcgatgcctcacaactccatcagatctggccatggagggctgaaccagctgggaggggcctttgtgaatggcagacctctgccggaagtggtccgccagcgcatcgtagacctggcccaccagggtgtaaggccctgcgacatctctcgccagctccgcgtcagccatggttgcgtcagcaagatccttggcaggtactacgagactggcagcatccggcctggagtgatagggggctccaagcccaaggtggccacccccaaggtggtggagaagattggggactacaaacgccagaaccctaccatgtttgcctgggagatccgagaccggctcctggctgagggcgtctgtgacaatgacactgtgcccagtgtcagctccattaatagaatcatccggaccaaagtgcagcaaccattcaacctccctatggacagctgcgtggccaccaagtccctgagtcccggacacacgctgatccccagctcagctgtaactcccccggagtcaccccagtcggattccctgggctccacctactccatcaatgggctcctgggcatcgctcagcctggcagcgacaagaggaaaatggatgacagtgatcaggatagctgccgactaagcattgactcacagagcagcagcagcggaccccgaaagcaccttcgcacggatgccttcagccagcaccacctcgagccgctcgagtgcccatttgagcggcagcactacccagaggcctatgcctcccccagccacaccaaaggcgagcagggcctctacccgctgcccttgctcaacagcaccctggacgacgggaaggccaccctgaccccttccaacacgccactggggcgcaacctctcgactcaccagacctaccccgtggtggcagggcgagagatggtggggcccacgctgcccggatacccaccccacatccccaccagcggacagggcagctatgcctcctctgccatcgcaggcatggtggcaggaagtgaatactctggcaatgcctatggccacaccccctactcctcctacagcgaggcctggggcttccccaactccagcttgctgagttccccatattattacagttccacatcaaggccgagtgcaccgcccaccactgccacggcctttgaccatctgtagttgccatggggacagtgggagcgactgagcaacaggaggactcagcctgggacaggccccagagagtcacacaaaggaatctttattattacatgaaaaataaccacaagtccagcattgcggcacactccctgtgtggttaatttaatgaaccatgaaagacaggatgaccttggacaaggccaaactgtcctccaagactccttaatgaggggcaggagtcccagggaaagagaaccatgccatgctgaaaaagacaaaattgaagaagaaatgtagccccagccggtaccctccaaaggagagaagaagcaatagccgaggaacttggggggatggcgaatggttcctgcccgggcccaagggtgcacagggcacctccatggctccattattaacacaactctagcaattatggaccataagcacttccctccagcccacaagtcacagcctggtgccgaggctctgctcaccagccacccagggagtcacctccctcagcctcccgcctgccccacacggaggctctggctgtcctctttcctccactccatttgcttggctctttctacacctccctcttggatgggctgagggctggagcgagtccctcagaaattccaccaggctgtcagctgacctctttttcctgctgctgtgaaggtatagcaccancccaggtcctcctgcagtgcggcatccccttggcagctgccgtcagccaggccagccccagggagcttaaaacagacattccacagggcctgggcccctgggaggtgaggtgtggtgtgcggcttcacccagggcagaacaaggcagaatcgcaggaaacccgcnttccccttcctgacagctcctgccaagccaaatgtgcttcctgcagctcacgcccaccangctactgaagggacccaaggcacccccnntgaagccagcgatagangggtccctctctgcntccccagcagctcctgcccccanaggcctgactgtatatactgtaaatgaaactttgtttgggtcaagcttccttctttctaacccccnagactttggcctctgagtgaaatgtctctctttgccctgtggggcttctctccttgatgcttctttctttttttaaagacaacctgccattaccacatgactcaataaaccattgctcttcaaaaaaaaaaaaaaaaaaaaaaaaaaaaaaaaa

SEQ ID NO: 245 - protein, 387 aa, Homo sapiens
MPHNSIRSGHGGLNQLGGAFVNGRPLPEVVRQRIVDLAHQGVRPCDISRQLRVSHGCVSKILGRYYETGSIRPGVIGGSKPKVATPKVVEKIGDYKRQNPTMFAWEIRDRLLAEGVCDNDTVPSVSSINRIIRTKVQQPFNLPMDSCVATKSLSPGHTLIPSSAVTPPESPQSDSLGSTYSINGLLGIAQPGSDKRKMDDSDQDSCRLSIDSQSSSSGPRKHLRTDAFSQHHLEPLECPFERQHYPEAYASPSHTKGEQGLYPLPLLNSTLDDGKATLTPSNTPLGRNLSTHQTYPVVAGREMVGPTLPGYPPHIPTSGQGSYASSAIAGMVAGSEYSGNAYGHTPYSSYSEAWRFPNSSLLSSPYYYSSTSRPSAPPTTATAFDHL

SEQ ID NO: 246 - protein, 387 aa, Homo sapiens
MPHNSIRSGHGGLNQLGGAFVNGRPLPEVVRQRIVDLAHQGVRPCDISRQLRVSHGCVSKILGRYYETGSIRPGVIGGSKPKVATPKVVEKIGDYKRQNPTMFAWEIRDRLLAEGVCDNDTVPSVSSINRIIRTKVQQPFNLPMDSCVATKSLSPGHTLIPSSAVTPPESPQSDSLGSTYSINGLLGIAQPGSDKRKMDDSDQDSCRLSIDSQSSSSGPRKHLRTDAFSQHHLEPLECPFERQHYPEAYASPSHTKGEQGLYPLPLLNSTLDDGKATLTPSNTPLGRNLSTHQTYPVVAGREMVGPTLPGYPPHIPTSGQGSYASSAIAGMVAGSEYSGNAYGHTPYSSYSEAWGFPNSSLLSSPYYYSSTSRPSAPPTTATAFDHL

SEQ ID NO: 247 - DNA, 2641 bp, Homo sapiens
  misc_feature (1)...(2641): n = A,T,C or G
ttcagaaggaggagagacaccgggcccagggcaccctcgcgggcgggcggacccaagcagtgagggcctgcagccggccggccagggcagcggcaggcgcggcccggacctacgggaggaagccccgagccctcggcgggctgcgagcgactccccggcgatgcctcacaactccatcagatctggccatggagggctgaaccagctgggaggggcctttgtgaatggcagacctctgccggaagtggtccgccagcgcatcgtagacctggcccaccagggtgtaaggccctgcgacatctctcgccagctccgcgtcagccatggctgcgtcagcaagatccttggcaggtactacgagactggcagcatccggcctggagtgatagggggctccaagcccaaggtggccacccccaaggtggtggagaagattggggactacaaacgccagaaccctaccatgtttgcctgggagatccgagaccggctcctggctgagggcgtctgtgacaatgacactgtgcccagtgtcagctccattaatagaatcatccggaccaaagtgcagcaaccattcaacctccctatggacagctgcgtggccaccaagtccctgagtcccggacacacgctgatccccagctcagctgtaactcccccggagtcaccccagtcggattccctgggctccacctactccatcaatgggctcctgggcatcgctcagcctggcagcgacaagaggaaaatggatgacagtgatcaggatagctgccgactaagcattgactcacagagcagcagcagcggaccccgaaagcaccttcgcacggatgccttcagccagcaccacctcgagccgctcgagtgcccatttgagcggcagcactacccagaggcctatgcctcccccagccacaccaaaggcgagcagggcctctacccgctgcccttgctcaacagcaccctggacgacgggaaggccaccctgaccccttccaacacgccactggggcgcaacctctcgactcaccagacctaccccgtggtggcagctccgcccttttggatctgcagcaagtcggctccggggtcccgcccttcaatgcctttccccatgctgcctccgtgtacgggcagttcacgggccaggccctcctctcagggcgagagatggtggggcccacgctgcccggatacccaccccacatccccaccagcggacagggcagctatgcctcctctgccatcgcaggcatggtggcaggaagtgaatactctggcaatgcctatggccacaccccctactcctcctacagcgaggcctggggcttccccaactccagcttgctgagttccccatattattacagttccacatcaaggccgagtgcaccgcccaccactgccacggcctttgaccatctgtagttgccatggggacagtgggagcgactgagcaacaggaggactcagcctgggacaggccccagagagtcacacaaaggaatctttattattacatgaaaaataaccacaagtccagcattgcggcacactccctgtgtggttaatttaatgaaccatgaaagacaggatgaccttggacaaggccaaactgtcctccaagactccttaatgaggggcaggagtcccagggaaagagaaccatgccatgctgaaaaagacaaaattgaagaagaaatgtagccccagccggtaccctccaaaggagagaagaagcaatagccgaggaacttggggggatggcgaatggttcctgcccgggcccaagggtgcacagggcacctccatggctccattattaacacaactctagcaattatggaccataagcacttccctccagcccacaagtcacagcctggtgccgaggctctgctcaccagccacccagggagtcacctccctcagcctcccgcctgccccacacggaggctctggctgtcctctttcctccactccatttgcttggctctttctacacctccctcttggatgggctgagggctggagcgagtccctcagaaattccaccaggctgtcagctgacctctttttcctgctgctgtgaaggtatagcaccancccaggtcctcctgcagtgcggcatccccttggcagctgccgtcagccaggccagccccagggagcttaaaacagacattccacagggcctgggcccctgggaggtgaggtgtggtgtgcggcttcacccagggcagaacaaggcagaatcgcaggaaacccgcnttccccttcctgacagctcctgccaagccaaatgtgcttcctgcagctcacgcccaccangctactgaagggacccaaggcacccccnntgaagccagcgatagangggtccctctctgcntccccagcagctcctgcccccanaggcctgactgtatatactgtaaatgaaactttgtttgggtcaagcttccttctttctaacccccnagactttggcctctgagtgaaatgtctctctttgccctgtggggcttctctccttgatgcttctttctttttttaaagacaacctgccattaccacatgactcaataaaccattgctcttcaaaaaaaaaaaaaaaaaaaaaaaaaaaaaaaaa

SEQ ID NO: 248 - protein, 398 aa, Homo sapiens
MPHNSIRSGHGGLNQLGGAFVNGRPLPEVVRQRIVDLAHQGVRPCDISRQLRVSHGCVSKILGRYYETGSIRPGVIGGSKPKVATPKVVEKIGDYKRQNPTMFAWEIRDRLLAEGVCDNDTVPSVSSINRIIRTKVQQPFNLPMDSCVATKSLSPGHTLIPSSAVTPPESPQSDSLGSTYSINGLLGIAQPGSDKRKMDDSDQDSCRLSIDSQSSSSGPRKHLRTDAFSQHHLEPLECPFERQHYPEAYASPSHTKGEQGLYPLPLLNSTLDDGKATLTPSNTPLGRNLSTHQTYPVVAAPPFWICSKSAPGSRPSMPFPMLPPCTGSSRARPSSQGERWWGPRCPDTHPTSPPADRAAMPPLPSQAWWQEVNTLAMPMATPPTPPTARPGASPTPAC

SEQ ID NO: 249 - DNA, 2410 bp, Homo sapiens
  misc_feature (1)...(2410): n = A,T,C or G
ttcagaaggaggagagacaccgggcccagggcaccctcgcgggcgggcggacccaagcagtgagggcctgcagccggccggccagggcagcggcaggcgcggcccggacctacgggaggaagccccgagccctcggcgggctgcgagcgactccccggcgatgcctcacaactccatcagatctggccatggagggctgaaccagctgggaggggcctttgtgaatggcagacctctgccggaagtggtccgccagcgcatcgtagacctggcccaccagggtgtaaggccctgcgacatctctcgccagctccgcgtcagccatggctgcgtcagcaagatccttggcaggtactacgagactggcagcatccggcctggagtgatagggggctccaagcccaaggtggccacccccaaggtggtggagaagattggggactacaaacgccagaaccctaccatgtttgcctgggagatccgagaccggctcctggctgagggcgtctgtgacaatgacactgtgcccagtgtcagctccattaatagaatcatccggaccaaagtgcagcaaccattcaacctccctatggacagctgcgtggccaccaagtccctgagtcccggacacacgctgatccccagctcagctgtaactcccccggagtcaccccagtcggattccctgggctccacctactccatcaatgggctcctgggcatcgctcagcctggcagcgacaagaggaaaatggatgacagtgatcaggatagctgccgactaagcattgactcacagagcagcagcagcggaccccgaaagcaccttcgcacggatgccttcagccagcaccacctcgagccgctcgagtgcccatttgagcggcagcactacccagaggcctatgcctcccccagccacaccaaaggcgagcagggcgagagatggtggggcccacgctgcccggatacccaccccacatccccaccagcggacagggcagctatgcctcctctgccatcgcaggcatggtggcaggaagtgaatactctggcaatgcctatggccacaccccctactcctcctacagcgaggcctggggcttccccaactccagcttgctgagttccccatattattacagttccacatcaaggccgagtgcaccgcccaccactgccacggcctttgaccatctgtagttgccatggggacagtgggagcgactgagcaacaggaggactcagcctgggacaggccccagagagtcacacaaaggaatctttattattacatgaaaaataaccacaagtccagcattgcggcacactccctgtgtggttaatttaatgaaccatgaaagacaggatgaccttggacaaggccaaactgtcctccaagactccttaatgaggggcaggagtcccagggaaagagaaccatgccatgctgaaaaagacaaaattgaagaagaaatgtagccccagccggtaccctccaaaggagagaagaagcaatagccgaggaacttggggggatggcgaatggttcctgcccgggcccaagggtgcacagggcacctccatggctccattattaacacaactctagcaattatggaccataagcacttccctccagcccacaagtcacagcctggtgccgaggctctgctcaccagccacccagggagtcacctccctcagcctcccgcctgccccacacggaggctctggctgtcctctttcctccactccatttgcttggctctttctacacctccctcttggatgggctgagggctggagcgagtccctcagaaattccaccaggctgtcagctgacctctttttcctgctgctgtgaaggtatagcaccancccaggtcctcctgcagtgcggcatccccttggcagctgccgtcagccaggccagccccagggagcttaaaacagacattccacagggcctgggcccctgggaggtgaggtgtggtgtgcggcttcacccagggcagaacaaggcagaatcgcaggaaacccgcnttccccttcctgacagctcctgccaagccaaatgtgcttcctgcagctcacgcccaccangctactgaagggacccaaggcacccccnntgaagccagcgatagangggtccctctctgcntccccagcagctcctgcccccanaggcctgactgtatatactgtaaatgaaactttgtttgggtcaagcttccttctttctaacccccnagactttggcctctgagtgaaatgtctctctttgccctgtggggcttctctccttgatgcttctttctttttttaaagacaacctgccattaccacatgactcaataaaccattgctcttcaaaaaaaaaaaaaaaaaaaaaaaaaaaaaaaaa

SEQ ID NO: 250 - protein, 321 aa, Homo sapiens
MPHNSIRSGHGGLNQLGGAFVNGRPLPEVVRQRIVDLAHQGVRPCDISRQLRVSHGCVSKILGRYYETGSIRPGVIGGSKPKVATPKVVEKIGDYKRQNPTMFAWEIRDRLLAEGVCDNDTVPSVSSINRIIRTKVQQPFNLPMDSCVATKSLSPGHTLIPSSAVTPPESPQSDSLGSTYSINGLLGIAQPGSDKRKMDDSDQDSCRLSIDSQSSSSGPRKHLRTDAFSQHHLEPLECPFERQHYPEAYASPSHTKGEQGERWWGPRCPDTHPTSPPADRAAMPPLPSQAWWQEVNTLAMPMATPPTPPTARPGASPTPAC

SEQ ID NO: 251 - DNA, 2308 bp, Homo sapiens
  misc_feature (1)...(2308): n = A,T,C or G
ttcagaaggaggagagacaccgggcccagggcaccctcgcgggcgggcggacccaagcagtgagggcctgcagccggccggccagggcagcggcaggcgcggcccggacctacgggaggaagccccgagccctcggcgggctgcgagcgactccccggcgatgcctcacaactccatcagatctggccatggagggctgaaccagctgggaggggcctttgtgaatggcagacctctgccggaagtggtccgccagcgcatcgtagacctggcccaccagggtgtaaggccctgcgacatctctcgccagctccgcgtcagccatggctgcgtcagcaagatccttggcaggtactacgagactggcagcatccggcctggagtgatagggggctccaagcccaaggtggccacccccaaggtggtggagaagattggggactacaaacgccagaaccctaccatgtttgcctgggagatccgagaccggctcctggctgagggcgtctgtgacaatgacactgtgcccagtgtcagctccattaatagaatcatccggaccaaagtgcagcaaccattcaacctccctatggacagctgcgtggccaccaagtccctgagtcccggacacacgctgatccccagctcagctgtaactcccccggagtcaccccagtcggattccctgggctccacctactccatcaatgggctcctgggcatcgctcagcctggcagcgacaagaggaaaatggatgacagtgatcaggatagctgccgactaagcattgactcacagagcagcagcagcggaccccgaaagcaccttcgcacggatgccttcagccagcaccacctcgagccgctcgagtgcccatttgagcggcagcactacccagaggcctatgcctcccccagccacaccaaaggcgrgcaggaagtgaatactctggcaatgcctatggccacaccccctactcctcctacagcgaggcctggggcttccccaactccagcttgctgagttccccatattattacagttccacatcaaggccgagtgcaccgcccaccactgccacggcctttgaccatctgtagttgccatggggacagtgggagcgactgagcaacaggaggactcagcctgggacaggccccagagagtcacacaaaggaatctttattattacatgaaaaataaccacaagtccagcattgcggcacactccctgtgtggttaatttaatgaaccatgaaagacaggatgaccttggacaaggccaaactgtcctccaagactccttaatgaggggcaggagtcccagggaaagagaaccatgccatgctgaaaaagacaaaattgaagaagaaatgtagccccagccggtaccctccaaaggagagaagaagcaatagccgaggaacttggggggatggcgaatggttcctgcccgggcccaagggtgcacagggcacctccatggctccattattaacacaactctagcaattatggaccataagcacttccctccagcccacaagtcacagcctggtgccgaggctctgctcaccagccacccagggagtcacctccctcagcctcccgcctgccccacacggaggctctggctgtcctctttcctccactccatttgcttggctctttctacacctccctcttggatgggctgagggctggagcgagtccctcagaaattccaccaggctgtcagctgacctctttttcctgctgctgtgaaggtatagcaccancccaggtcctcctgcagtgcggcatccccttggcagctgccgtcagccaggccagccccagggagcttaaaacagacattccacagggcctgggcccctgggaggtgaggtgtggtgtgcggcttcacccagggcagaacaaggcagaatcgcaggaaacccgcnttccccttcctgacagctcctgccaagccaaatgtgcttcctgcagctcacgcccaccangctactgaagggacccaaggcacccccnntgaagccagcgatagangggtccctctctgcntccccagcagctcctgcccccanaggcctgactgtatatactgtaaatgaaactttgtttgggtcaagcttccttctttctaacccccnagactttggcctctgagtgaaatgtctctctttgccctgtggggcttctctccttgatgcttctttctttttttaaagacaacctgccattaccacatgactcaataaaccattgctcttcaaaaaaaaaaaaaaaaaaaaaaaaaaaaaaaaa

SEQ ID NO: 252 - protein, 287 aa, Homo sapiens
MPHNSIRSGHGGLNQLGGAFVNGRPLPEVVRQRIVDLAHQGVRPCDISRQLRVSHGCVSKILGRYYETGSIRPGVIGGSKPKVATPKVVEKIGDYKRQNPTMFAWEIRDRLLAEGVCDNDTVPSVSSINRIIRTKVQQPFNLPMDSCVATKSLSPGHTLIPSSAVTPPESPQSDSLGSTYSINGLLGIAQPGSDKRKMDDSDQDSCRLSIDSQSSSSGPRKHLRTDAFSQHHLEPLECPFERQHYPEAYASPSHTKGEQEVNTLAMPMATPPTPPTARPGASPTPAC

SEQ ID NO: 253 - DNA, 2148 bp, Homo sapiens
gcttcagggtacagctcccccgcagccagaagccgggcctgcagcccctcagcaccgctccgggacaccccacccgcttcccaggcgtgacctgtcaacagcaacttcgcggtgtggtgaactctctgaggaaaaaccattttgattattactctcagacgtgcgtggcaacaagtgactgagacctagaaatccaagcgttggaggtcctgaggccagcctaagtcgcttcaaaatggaacgaaggcgtttgtggggttccattcagagccgatacatcagcatgagtgtgtggacaagcccacggagacttgtggagctggcagggcagagcctgctgaaggatgaggccctggccattgccgccctggagttgctgcccagggagctcttcccgccactcttcatggcagcctttgacgggagacacagccagaccctgaaggcaatggtgcaggcctggcccttcacctgcctccctctgggagtgctgatgaagggacaacatcttcacctggagaccttcaaagctgtgcttgatggacttgatgtgctccttgcccaggaggttcgccccaggaggtggaaacttcaagtgctggatttacggaagaactctcatcaggacttctggactgtatggtctggaaacagggccagtctgtactcatttccagagccagaagcagctcagcccatgacaaagaagcgaaaagtagatggtttgagcacagaggcagagcagcccttcattccagtagaggtgctcgtagacctgttcctcaaggaaggtgcctgtgatgaattgttctcctacctcattgagaaagtgaagcgaaagaaaaatgtactacgcctgtgctgtaagaagctgaagatttttgcaatgcccatgcaggatatcaagatgatcctgaaaatggtgcagctggactctattgaagatttggaagtgacttgtacctggaagctacccaccttggcgaaattttctccttacctgggccagatgattaatctgcgtagactcctcctctcccacatccatgcatcttcctacatttccccggagaaggaagagcagtatatcgcccagttcacctctcagttcctcagtctgcagtgcctgcaggctctctatgtggactctttatttttccttagaggccgcctggatcagttgctcaggcacgtgatgaaccccttggaaaccctctcaataactaactgccggctttcggaaggggatgtgatgcatctgtcccagagtcccagcgtcagtcagctaagtgtcctgagtctaagtggggtcatgctgaccgatgtaagtcccgagcccctccaagctctgctggagagagcctctgccaccctccaggacctggtctttgatgagtgtgggatcacggatgatcagctccttgccctcctgccttccctgagccactgctcccagcttacaaccttaagcttctacgggaattccatctccatatctgccttgcagagtctcctgcagcacctcatcgggctgagcaatctgacccacgtgctgtatcctgtccccctggagagttatgaggacatccatggtaccctccacctggagaggcttgcctatctgcatgccaggctcagggagttgctgtgtgagttggggcggcccagcatggtctggcttagtgccaacccctgtcctcactgtggggacagaaccttctatgacccggagcccatcctgtgcccctgtttcatgcctaactagctgggtgcacatatcaaatgcttcattctgcatacttggacactaaagccaggatgtgcatgcatcttgaagcaacaaagcagccacagtttcagacaaatgttcagtgtgagtgaggaaaacatgttcagtgaggaaaaaacattcagacaaatgttcagtgaggaaaaaaaggggaagttggggataggcagatgttgacttgaggagttaatgtgatctttggggagatacatcttatagagttagaaatagaatctgaatttctaaagggagattctggcttgggaagtacatgtaggagttaatccctgtgtagactgttgtaaagaaactgttgaaaataaagagaagcaatgtgaagcaaaaaaaaaaaaaaaaaa

SEQ ID NO: 254 - protein, 509 aa, Homo sapiens
MERRRLWGSIQSRYISMSVWTSPRRLVELAGQSLLKDEALAIAALELLPRELFPPLFMAAFDGRHSQTLKAMVQAWPFTCLPLGVLMKGQHLHLETFKAVLDGLDVLLAQEVRPRRWKLQVLDLRKNSHQDFWTVWSGNRASLYSFPEPEAAQPMTKKRKVDGLSTEAEQPFIPVEVLVDLFLKEGACDELFSYLIEKVKRKKNVLRLCCKKLKIFAMPMQDIKMILKMVQLDSIEDLEVTCTWKLPTLAKFSPYLGQMINLRRLLLSHIHASSYISPEKEEQYIAQFTSQFLSLQCLQALYVDSLFFLRGRLDQLLRHVMNPLETLSITNCRLSEGDVMHLSQSPSVSQLSVLSLSGVMLTDVSPEPLQALLERASATLQDLVFDECGITDDQLLALLPSLSHCSQLTTLSFYGNSISISALQSLLQHLIGLSNLTHVLYPVPLESYEDIHGTLHLERLAYLHARLRELLCELGRPSMVWLSANPCPHCGDRTFYDPEPILCPCFMPN

SEQ ID NO: 255 - DNA, 2261 bp, Homo sapiens
ccgcggttccggctgctccggcgaggcgacccttgggtcggcgctgcgggcgaggtgggcaggtaggtgggcggacggccgcggttctccggcaagcgcaggcggcggagtcccccacggcgcccgaagcgccccccgcacccccggcctccagcgttgaggcgggggagtgaggagatgccgacccagagggacagcagcaccatgtcccacacggtcgcaggcggcggcagcggggaccattcccaccaggtccgggtgaaagcctactaccgcggggatatcatgataacacattttgaaccttccatctcctttgagggcctttgcaatgaggttcgagacatgtgttcttttgacaacgaacagctcttcaccatgaaatggatagatgaggaaggagacccgtgtacagtatcatctcagttggagttagaagaagcctttagactttatgagctaaacaaggattctgaactcttgattcatgtgttcccttgtgtaccagaacgtcctgggatgccttgtccaggagaagataaatccatctaccgtagaggtgcacgccgctggagaaagctttattgtgccaatggccacactttccaagccaagcgtttcaacaggcgtgctcactgtgccatctgcacagaccgaatatggggacttggacgccaaggatataagtgcatcaactgcaaactcttggttcataagaagtgccataaactcgtcacaattgaatgtgggcggcattctttgccacaggaaccagtgatgcccatggatcagtcatccatgcattctgaccatgcacagacagtaattccatataatccttcaagtcatgagagtttggatcaagttggtgaagaaaaagaggcaatgaacaccagggaaagtggcaaagcttcatccagtctaggtcttcaggattttgatttgctccgggtaataggaagaggaagttatgccaaagtactgttggttcgattaaaaaaaacagatcgtatttatgcaatgaaagttgtgaaaaaagagcttgttaatgatgatgaggatattgattgggtacagacagagaagcatgtgtttgagcaggcatccaatcatcctttccttgttgggctgcattcttgctttcagacagaaagcagattgttctttgttatagagtatgtaaatggaggagacctaatgtttcatatgcagcgacaaagaaaacttcctgaagaacatgccagattttactctgcagaaatcagtctagcattaaattatcttcatgagcgagggataatttatagagatttgaaactggacaatgtattactggactctgaaggccacattaaactcactgactacggcatgtgtaaggaaggattacggccaggagatacaaccagcactttctgtggtactcctaattacattgctcctgaaattttaagaggagaagattatggtttcagtgttgactggtgggctcttggagtgctcatgtttgagatgatggcaggaaggtctccatttgatattgttgggagctccgataaccctgaccagaacacagaggattatctcttccaagttattttggaaaaacaaattcgcataccacgttctctgtctgtaaaagctgcaagtgttctgaagagttttcttaataaggaccctaaggaacgattgggttgtcatcctcaaacaggatttgctgatattcagggacacccgttcttccgaaatgttgattgggatatgatggagcaaaaacaggtggtacctccctttaaaccaaatatttctggggaatttggtttggacaactttgattctcagtttactaatgaacctgtccagctcactccagatgacgatgacattgtgaggaagattgatcagtctgaatttgaaggttttgagtatatcaatcctcttttgatgtctgcagaagaatgtgtctgatcctcatttttcaaccatgtattctactcatgttgccatttaatgcatggataaacttgctgcaagcctggatacaattaaccattttatatttgccacctacaaaaaaacacccaatatcttctcttgtagactatatgaatcaattattacatctgttttactatgaaaaaaaaattaatactactagcttccagacaatcatgtcaaaatttagttgaactggtttttcagtttttaaaaggcctacagatgagtaatgaagttaccttttttgtttaaaaaaaaaaaag

SEQ ID NO: 256 - protein, 587 aa, Homo sapiens
MSHTVAGGGSGDHSHQVRVKAYYRGDIMITHFEPSISFEGLCNEVRDMCSFDNEQLFTMKWIDEEGDPCTVSSQLELEEAFRLYELNKDSELLIHVFPCVPERPGMPCPGEDKSIYRRGARRWRKLYCANGHTFQAKRFNRRAHCAICTDRIWGLGRQGYKCINCKLLVHKKCHKLVTIECGRHSLPQEPVMPMDQSSMHSDHAQTVIPYNPSSHESLDQVGEEKEAMNTRESGKASSSLGLQDFDLLRVIGRGSYAKVLLVRLKKTDRIYAMKVVKKELVNDDEDIDWVQTEKHVFEQASNHPFLVGLHSCFQTESRLFFVIEYVNGGDLMFHMQRQRKLPEEHARFYSAEISLALNYLHERGIIYRDLKLDNVLLDSEGHIKLTDYGMCKEGLRPGDTTSTFCGTPNYIAPEILRGEDYGFSVDWWALGVLMFEMMAGRSPFDIVGSSDNPDQNTEDYLFQVILEKQIRIPRSLSVKAASVLKSFLNKDPKERLGCHPQTGFADIQGHPFFRNVDWDMMEQKQVVPPFKPNISGEFGLDNFDSQFTNEPVQLTPDDDDIVRKIDQSEFEGFEYINPLLMSAEECV

SEQ ID NO: 257 - DNA, 6742 bp, Homo sapiens
gtcgaccccgcgtccggcgcggcagctcttttccttcttcctccacttcccctaccctccaccgtccgggagccgccgccaccgccgccgaggagtcaggaagttcaagatggccgccgcggagacccagtcgctacgggagcagccagagatggaagatgctaattctgaaaagagtataaatgaagaaaatggagaagtatcagaagaccagtctcaaaataagcacagtcgtcacaaaaaaaagaagcataaacacagaagtaaacataagaaacataaacattcctcagaagaagacaaggataaaaaacataaacataagcataaacataagaaacacaaaagaaaagaggttattgatgcttctgataaagagggtatgtctccagcaaaaagaactaaacttgatgatttagctttgctagaagacttggaaaaacagagagccttgattaaggccgaacttgataatgagttaatggaaggaaaggtccagtctggtatggggctcattttgcaaggttatgagtctggctctgaagaagagggggaaattcatgaaaaggcaagaaatggaaataggtctagtactagatcttcaagtacaaaggggaaacttgaacttgtggacaataaaattactacaaagaaacgaagtaaaagcagatccaaagaacggactagacataggtctgataaaaagaaaagtaaggggggtattgaaatcgttaaagagaaaacaactaggagcaagtcaaaggagaggaaaaaatctaaaagcccatccaaaagaagtaagtctcaagatcaagcaaggaaatcaaaatcccctacccttagaaggcgatctcaagagaaaattggtaaggccagatctcctactgatgataaggttaaaattgaagataaaagtaaatcaaaagataggaaaaaatccccaattataaatgaaagtagaagtcgcgatcgaggtaaaaaatccagatccccagttgatttaagaggtaaatccaaagacagaaggtcacggtccaaagagagaaaatcaaaacggtctgaaactgataaagaaaagaagccaattaaatctccctctaaagatgcttcatctgggaaagaaaataggtcacccagcagaagacctggtcgtagtcctaaaagaagaagtttgtctccaaaaccacgtgataaatcaagaagaagcaggtctccacttttgaatgatagaagatctaagcagagcaaatccccctcgcggacactgtctcctgggagaagagccaagagccgatccttagaaagaaaacgacgagaaccagagaggagacgactttcttctccaagaacacgacctcgagatgatatcctcagtagacgtgaaagatcaaaagatgccagccccatcaatagatggtctccaacccgaagaagaagtagatctcccattagaaggaggtctcgttccccactcagacgtagcaggtctccaagaagaagaagcagatctcctcggagaagggacagaggtcggaggagcagatcacgcttgcgaaggcggtctcgatcacgcggtggtcgtagacgaaggagcagaagcaaagtaaaggaagataaatttaaaggaagtctttctgaaggaatgaaagttgagcaggaatcttcgtctgatgataaccttgaagactttgatgtagaggaagaagatgaagaagccctaatagaacagagaagaatccaaaggcaggcaattgttcagaaatataaataccttgctgaagatagcaacatgtctgtgccatctgaaccaagcagcccccagagcagtacgagaacacgatcaccatctccagatgacattctggagcgagtagctgctgatgttaaagagtatgaacgggaaaatgttgatacatttgaggcctcagtgaaagccaagcataatctaatgacagttgaacagaataatggttcatctcagaagaagttgttggcacctgatatgtttacagaatctgatgatatgtttgctgcgtattttgatagtgctcgtcttcgggccgctggcattggaaaagatttcaaagagaatcccaacctcagagataactggaccgatgcagaaggctattatcgtgtgaacataggtgaagtcctagataaacgttacaatgtgtatggctacactgggcaaggtgtattcagtaatgttgtacgagccagagataatgcaagagccaaccaagaagtggctgtaaagatcatcagaaacaatgagctcatgcaaaagactggtttaaaagaattagagttcttgaaaaaacttaatgatgctgatcctgatgacaaatttcattgtctgagactcttcaggcacttctatcacaagcagcatctttgtctggtattcgagcctctcagcatgaacttacgagaggtgttaaaaaaatatggtaaagatgttggtcttcatattaaagctgtaagatcctatagtcagcagttgttcctggcattgaaactccttaaaagatgcaatatcctacatgcagatatcaagccagacaatatcctggttaatgaatccaaaactattttaaagctttgcgattttgggtcggcttcacatgttgcggataatgacataacaccttatcttgtcagtagattttatcgtgctcctgaaatcattataggtaaaagctatgactatggtatagatatgtggtctgtaggttgcaccttatacgaactctatactggaaaaattttattccctggcaaaaccaataaccatatgctgaagcttgcaatggatctcaaaggaaagatgccaaataagatgattcgaaaaggtgtgttcaaagatcagcattttgatcaaaatctcaacttcatgtacatagaagttgataaagtaacagagagggagaaagttactgttatgagcaccattaatccaactaaggacctgttggctgacttgattgggtgccagagacttcctgaagaccaacgtaagaaagtacaccagctaaaggacttgttggaccagattctgatgttggacccagctaaacgaattagcatcaaccaggccctacagcacgccttcatccaggaaaaaatttaaacaagatgaagaaactccaagggtttgagtaaatacaaagactgaagaaatttcacagcagtttattaatgtatataaacttataaatatttctccagcaaatttgaggaagcatgatatatttgaattaacaccaagggtgatatttcttttagagatgttagttaatctgttttgtgtcttacgtgaaatttcactgtagactgttttaaattgccaagactgcacaaaattacagtgctaatgtatatggttgcagttcacataaagacaaaagcatctgttatgaaatgagtagtaatattgggtggttgatttgttcttagcagacttggcttcattttggtcttgagataaaatggccagcataaatgctgtttatattcacgttttcctaggtgtgtgtgtgcaggccacagcagcatgcccttggtgtagtcagtgccgaaaggggtctgttccttcttgagcctgcctgcagggatggtctccttttaaagcaggttgtgtgcagcattcagtacactgaaggtaagctaaaccatcaacatctctggtgttttaagatgttattttattggaacaactgacaaatgagggatgttagctttgtggcagaattccctgcatgtgtgataactgatcttgttttattttttggcattgcaactgtggcatagttacaatttctgtttgttcatcacatttaaaattggaagagaacgcgcttgatggatagagcgccttcagtgtactgtttcttattaactttactttttttaaatcaacttgctatagactttatatacattttgttaaatatagttcctagtgacatagaaacgatgcgtagttttcatttactaattacaaatgttgaggcctaattctgaaagtcctcatatttaaaggctagacaacgtaatgaaatttttaactatttgtatgtcattttgaaagtgtactgctttatggtaaaagtgtttttcatttgttcattgttttcattatttgtgatcatgttgtctttcaatacaggcataaaccttccactcttgaacaaagcagctgctttttaaaagcggtaattgcttctttaccttttatttcttttgtaaatgaagcttttctttaagaatgtgactttaaagtgttgtctattgcataaaacagttgacactcacttattgtaaagtgaagattgttctactgcatgtgaagtggaccatgcagatttctgtatgttctcagtatgcatcactagataataaagtcttttgtgaacaaggcatttgtagccatttttaaaagtttttgtcttcagtgctggtaagtcaggtaaaccataaatagttaaaagcaaccttttgtttttttcctgaaagtttttaattgaaagtattattagttaaagatgtaaacctagccaaaattaccagtttattaataattaggatcctaattatttcaaaaaatcctacaaatattgtcagctttcagtgtagtgagattattcctgtaggttatggggtataattcaggatttaactaatgtttctgctattttctcacttttccttttgatggtgcggaaagagaaaaaggaaaacggggcacaggccattcgacgccttctccaaggggtctgatttgctgagacaccagcttcaccttcttaacaaggtgcagctcagtggaagatgatgacaaccagaagacatgagctaaggtttctgtcctataaaagatttattaaaaaacaatccttcatttattttttgtctaattttttagttttcagcattatgatttgggttttattggtgtttggtatttagaattagtgctgttgtggagtgcgtctgtaaagtgcttgttttatcatacttcctgcctctcccctcccccagtttctcctcccctaaaataaaaatagtggtcaactttagtaatataaaaggctgctggatgctgagattccacataacacatggttgtcaaaattggatgttaaggattcttagaaaaacagcaaccaccagaatagcatatatctaaaagtagtcttcagctttaggcagatgcaaaagaatacaaactggaatattaagaatactgttcaactcctttagtatctgttccccaacttaccctgtagaaacctcgttattaaccagtgttccagtcttaaagtagacaaaatattcagagccattttttttaagggaaatgaaaaagatactctgggttttttatactccccaatttagcatatctagactacctatttgaaaggaaccctatcaactgtcttatgtacgttacatgattttcctacactctgtaattttgctgaggtgcaatttggaactctgcaagacctactagattgaatttatttagtgaatgctcctgaataaatgtgcattcctcttttagagtagctgtatgcttttcaaatgctatctgccgtgaattttttgcttttattatactttatggcaaaagtgatatcaagtgattgtcagacttgagggctcatagaagtgttaggtacggctctcaaagatgttacagttttttctagggttgggagaatagttgagatctggaaagcatagacattttttacactctggatagactttattcttgaagatcatcagaaatgaggttggaatttcgaggttttgagcagggggagcatcttatattcacccttaaatcgttattaatacatcctgttttcttcattccctgatagctatctcatttcactctactgtctcaaaattttgttttaaaataatagaaatgttttgccattattaagtaccactttattcctaacaaaaataagtactcaggacttttttttcaaaatgaaatatttatgtactgttttatggtatgtggtagagtaagtaaaatgtaatgttctcagttttgttccatatttgcattcctcttatgctttacctgtattttatcatttgtaagcagaactctagctatatggggtagaaataaaatctctgagatgaaacaaaggaatcaacatgataaaatttaggcgaagtagttaagaaatggcccttttgaatgttgaagataggaaagaaagccatatattcaaatatgtaattttcctcatttagttataatgacatctttaccaattgggcttcataaatgtgtttctttcttaatagtatcctagttccagcatatattcaacatgaattttatcattctcctcctaatggaatgtcttccttatagaaatgttcacgacaaattcatttgtgttttttacatgtcaataatgtatgctaaattaaaatgttttccagttattctgatagatgtcattatggcatccttaatttttcttctccttctgtatatagggtaagggactgttctgaagaacctttccatttagtgatcaagatatggaagctgatttctgaaaatgctcagtgtgtactctaattatttatggtaccatttgaattgtaacttgcattttagcagtgcatgtttctaattgacttactgggaaactgaataaaatatgcctcttattatcaaaaaaaaaaaaaaagg

SEQ ID NO: 258 - protein, 1043 aa, Homo sapiens
STPRPARQLFSFFLHFPYPPPSGSRRHRRRGVRKFKMAAAETQSLREQPEMEDANSEKSINEENGEVSEDQSQNKHSRHKKKKHKHRSKHKKHKHSSEEDKDKKHKHKHKHKKHKRKEVIDASDKEGMSPAKRTKLDDLALLEDLEKQRALIKAELDNELMEGKVQSGMGLILQGYESGSEEEGEIHEKARNGNRSSTRSSSTKGKLELVDNKITTKKRSKSRSKERTRHRSDKKKSKGGIEIVKEKTTRSKSKERKKSKSPSKRSKSQDQARKSKSPTLRRRSQEKIGKARSPTDDKVKIEDKSKSKDRKKSPIINESRSRDRGKKSRSPVDLRGKSKDRRSRSKERKSKRSETDKEKKPIKSPSKDASSGKENRSPSRRPGRSPKRRSLSPKPRDKSRRSRSPLLNDRRSKQSKSPSRTLSPGRRAKSRSLERKRREPERRRLSSPRTRPRDDILSRRERSKDASPINRWSPTRRRSRSPIRRRSRSPLRRSRSPRRRSRSPRRRDRGRRSRSRLRRRSRSRGGRRRRSRSKVKEDKFKGSLSEGMKVEQESSSDDNLEDFDVEEEDEEALIEQRRIQRQAIVQKYKYLAEDSNMSVPSEPSSPQSSTRTRSPSPDDILERVAADVKEYERENVDTFEASVKAKHNLMTVEQNNGSSQKKLLAPDMFTESDDMFAAYFDSARLRAAGIGKDFKENPNLRDNWTDAEGYYRVNIGEVLDKRYNVYGYTGQGVFSNVVRARDNARANQEVAVKIIRNNELMQKTGLKELEFLKKLNDADPDDKFHCLRLFRHFYHKQHLCLVFEPLSMNLREVLKKYGKDVGLHIKAVRSYSQQLFLALKLLKRCNILHADIKPDNILVNESKTILKLCDFGSASHVADNDITPYLVSRFYRAPEIIIGKSYDYGIDMWSVGCTLYELYTGKILFPGKTNNHMLKLAMDLKGKMPNKMIRKGVFKDQHFDQNLNFMYIEVDKVTEREKVTVMSTINPTKDLLADLIGCQRLPEDQRKKVHQLKDLLDQILMLDPAKRISINQALQHAFIQEKI

SEQ ID NO: 259 - DNA, 5265 bp, Homo sapiens
gtcgaccccgcgtccggcgcggcagctcttttccttcttcctccacttcccctaccctccaccgtccgggagccgccgccaccgccgccgaggagtcaggaagttcaagatggccgccgcggagacccagtcgctacgggagcagccagagatggaagatgctaattctgaaaagagtataaatgaagaaaatggagaagtatcagaagaccagtctcaaaataagcacagtcgtcacaaaaaaaagaagcataaacacagaagtaaacataagaaacataaacattcctcagaagaagacaaggataaaaaacataaacataagcataaacataagaaacacaaaagaaaagaggttattgatgcttctgataaagagggtatgtctccagcaaaaagaactaaacttgatgatttagctttgctagaagacttggaaaaacagagagccttgattaaggccgaacttgataatgagttaatggaaggaaaggtccagtctggtatggggctcattttgcaaggttatgagtctggctctgaagaagagggggaaattcatgaaaaggcaagaaatggaaataggtctagtactagatcttcaagtacaaaggggaaacttgaacttgtggacaataaaattactacaaagaaacgaagtaaaagcagatccaaagaacggactagacataggtctgataaaaagaaaagtaaggggggtattgaaatcgttaaagagaaaacaactaggagcaagtcaaaggagaggaaaaaatctaaaagcccatccaaaagaagtaagtctcaagatcaagcaaggaaatcaaaatcccctacccttagaaggcgatctcaagagaaaattggtaaggccagatctcctactgatgataaggttaaaattgaagataaaagtaaatcaaaagataggaaaaaatccccaattataaatgaaagtagaagtcgcgatcgaggtaaaaaatccagatccccagttgatttaagaggtaaatccaaagacagaaggtcacggtccaaagagagaaaatcaaaacggtctgaaactgataaagaaaagaagccaattaaatctccctctaaagatgcttcatctgggaaagaaaataggtcacccagcagaagacctggtcgtagtcctaaaagaagaagtttgtctccaaaaccacgtgataaatcaagaagaagcaggtctccacttttgaatgatagaagatctaagcagagcaaatccccctcgcggacactgtctcctgggagaagagccaagagccgatccttagaaagaaaacgacgagaaccagagaggagacgactttcttctccaagaacacgacctcgagatgatatcctcagtagacgtgaaagatcaaaagatgccagccccatcaatagatggtctccaacccgaagaagaagtagatctcccattagaaggaggtctcgttccccactcagacgtagcaggtctccaagaagaagaagcagatctcctcggagaagggacagaggtcggaggagcagatcacgcttgcgaaggcggtctcgatcacgcggtggtcgtagacgaaggagcagaagcaaagtaaaggaagataaatttaaaggaagtctttctgaaggaatgaaagttgagcaggaatcttcgtctgatgataaccttgaagactttgatgtagaggaagaagatgaagaagccctaatagaacagagaagaatccaaaggcaggcaattgttcagaaatataaataccttgctgaagatagcaacatgtctgtgccatctgaaccaagcagcccccagagcagtacgagaacacgatcaccatctccagatgacattctggagcgagtagctgctgatgttaaagagtatgaacgggaaaatgttgatacatttgaggcctcagtgaaagccaagcataatctaatgacagttgaacagaataatggttcatctcagaagaagttgttggcacctgatatgtttacagaatctgatgatatgtttgctgcgtattttgatagtgctcgtcttcgggccgctggcattggaaaagatttcaaagagaatcccaacctcagagataactggaccgatgcagaaggctattatcgtgtgaacataggtgaagtcctagataaacgttacaatgtgtatggctacactgggcaaggtgtattcagtaatgttgtacgagccagagataatgcaagagccaaccaagaagtggctgtaaagatcatcagaaacaatgagctcatgcaaaagactggtttaaaagaattagagttcttgaaaaaacttaatgatgctgatcctgatgacaaatttcattgtctgagactcttcaggcacttctatcacaagcagcatctttgtctggtattcgagcctctcagcatgaacttacgagaggtgttaaaaaaatatggtaaagatgttggtcttcatattaaagctgtaagatcctatagtcagcagttgttcctggcattgaaactccttaaaagatgcaatatcctacatgcagatatcaagccagacaatatcctggttaatgaatccaaaactattttaaagctttgcgattttgggtcggcttcacatgttgcggataatgacataacaccttatcttgtcagtagattttatcgtgctcctgaaatcattataggtaaaagctatgactatggtatagatatgtggtctgtaggttgcaccttatacgaactctatactggaaaaattttattccctggcaaaaccaataaccatatgctgaagcttgcaatggatctcaaaggaaagatgccaaataagatgattcgaaaaggtgtgttcaaagatcagcattttgatcaaaatctcaacttcatgtacatagaagttgataaagtaacagagagggagaaagttactgttatgagcaccattaatccaactaaggacctgttggctgacttgattgggtgccagagacttcctgaagaccaacgtaagaaagtacaccagctaaaggacttgttggaccagattctgatgttggacccagctaaacgaattagcatcaaccaggccctacagcacgccttcatccaggaaaaaatttaaacaagatgaagaaactccaagggtttgagtaaatacaaagactgaagaaatttcacagcagtttattaatgtatataaacttataaatatttctccagcaaatttgaggaagcatgatatatttgaattaacaccaagggtgatatttcttttagagatgttagttaatctgttttgtgtcttacgtgaaatttcactgtagactgttttaaattgccaagactgcacaaaattacagtgctaatgtatatggttgcagttcacataaagacaaaagcatctgttatgaaatgagtagtaatattgggtggttgatttgttcttagcagacttggcttcattttggtcttgagataaaatggccagcataaatgctgtttatattcacgttttcctaggtgtgtgtgtgcaggccacagcagcatgcccttggtgtagtcagtgccgaaaggggtctgttccttcttgagcctgcctgcagggatggtctccttttaaagcaggttgtgtgcagcattcagtacactgaaggtaagctaaaccatcaacatctctggtgttttaagatgttattttattggaacaactgacaaatgagggatgttagctttgtggcagaattccctgcatgtgtgataactgatcttgttttattttttggcattgcaactgtggcatagttacaatttctgtttgttcatcacatttaaaattggaagagaacgcgcttgatggatagagcgccttcagtgtactgtttcttattaactttactttttttaaatcaacttgctatagactttatatacattttgttaaatatagttcctagtgacatagaaacgatgcgtagttttcatttactaattacaaatgttgaggcctaattctgaaagtcctcatatttaaaggctagacaacgtaatgaaatttttaactatttgtatgtcattttgaaagtgtactgctttatggtaaaagtgtttttcatttgttcattgttttcattatttgtgatcatgttgtctttcaatacaggcataaaccttccactcttgaacaaagcagctgctttttaaaagcggtaattgcttctttaccttttatttcttttgtaaatgaagcttttctttaagaatgtgactttaaagtgttgtctattgcataaaacagttgacactcacttattgtaaagtgaagattgttctactgcatgtgaagtggaccatgcagatttctgtatgttctcagtatgcatcactagataataaagtcttttgtgaacaaggcatttgtagccatttttaaaagtttttgtcttcagtgctggtaagtcaggtaaaccataaatagttaaaagcaaccttttgtttttttcctgaaagtttttaattgaaagtattattagttaaagatgtaaacctagccaaaattaccagtttattaataattaggatcctaattatttcaaaaaatcctacaaatattgtcagctttcagtgtagtgagattattcctgtaggttatggggtataattcaggatttaactaatgtttctgctattttctcacttttccttttgatggtgcggaaagagaaaaaggaaaacggggcacaggccattcgacgccttctccaaggggtctgatttgctgagacaccagcttcaccttcttaacaaggcacctaattacaacaagcatgcacattttggtgcattcaagaatggaaaatcagaatagcagcattgattcttctggtgggttttgctccatttaaagacatgaaatgaactacagccaggaaggtgatagatgatataataagccacctctgaacctacaccccgtctcttcacggtttagacttactaaaataaatacaaggtgcagctcagtggaagatgatgacaaccagaagacatgagctaagggtaagggactgttctgaagaacctttccatttagtgatcaagatatggaagctgatttctgaaaatgctcagtgtgtactctaattatttatggtaccatttgaattgtaacttgcattttagcagtgcatgtttctaattgacttactgggaaactgaataaaatatgcctcttattatcaaaaaaaaaaaaaaagg

SEQ ID NO: 260 - DNA, 5138 bp, Homo sapiens
gtcgaccccgcgtccggcgcggcagctcttttccttcttcctccacttcccctaccctccaccgtccgggagccgccgccaccgccgccgaggagtcaggaagttcaagatggccgccgcggagacccagtcgctacgggagcagccagagatggaagatgctaattctgaaaagagtataaatgaagaaaatggagaagtatcagaagaccagtctcaaaataagcacagtcgtcacaaaaaaaagaagcataaacacagaagtaaacataagaaacataaacattcctcagaagaagacaaggataaaaaacataaacataagcataaacataagaaacacaaaagaaaagaggttattgatgcttctgataaagagggtatgtctccagcaaaaagaactaaacttgatgatttagctttgctagaagacttggaaaaacagagagccttgattaaggccgaacttgataatgagttaatggaaggaaaggtccagtctggtatggggctcattttgcaaggttatgagtctggctctgaagaagagggggaaattcatgaaaaggcaagaaatggaaataggtctagtactagatcttcaagtacaaaggggaaacttgaacttgtggacaataaaattactacaaagaaacgaagtaaaagcagatccaaagaacggactagacataggtctgataaaaagaaaagtaaggggggtattgaaatcgttaaagagaaaacaactaggagcaagtcaaaggagaggaaaaaatctaaaagcccatccaaaagaagtaagtctcaagatcaagcaaggaaatcaaaatcccctacccttagaaggcgatctcaagagaaaattggtaaggccagatctcctactgatgataaggttaaaattgaagataaaagtaaatcaaaagataggaaaaaatccccaattataaatgaaagtagaagtcgcgatcgaggtaaaaaatccagatccccagttgatttaagaggtaaatccaaagacagaaggtcacggtccaaagagagaaaatcaaaacggtctgaaactgataaagaaaagaagccaattaaatctccctctaaagatgcttcatctgggaaagaaaataggtcacccagcagaagacctggtcgtagtcctaaaagaagaagtttgtctccaaaaccacgtgataaatcaagaagaagcaggtctccacttttgaatgatagaagatctaagcagagcaaatccccctcgcggacactgtctcctgggagaagagccaagagccgatccttagaaagaaaacgacgagaaccagagaggagacgactttcttctccaagaacacgacctcgagatgatatcctcagtagacgtgaaagatcaaaagatgccagccccatcaatagatggtctccaacccgaagaagaagtagatctcccattagaaggaggtctcgttccccactcagacgtagcaggtctccaagaagaagaagcagatctcctcggagaagggacagaggtcggaggagcagatcacgcttgcgaaggcggtctcgatcacgcggtggtcgtagacgaaggagcagaagcaaagtaaaggaagataaatttaaaggaagtctttctgaaggaatgaaagttgagcaggaatcttcgtctgatgataaccttgaagactttgatgtagaggaagaagatgaagaagccctaatagaacagagaagaatccaaaggcaggcaattgttcagaaatataaataccttgctgaagatagcaacatgtctgtgccatctgaaccaagcagcccccagagcagtacgagaacacgatcaccatctccagatgacattctggagcgagtagctgctgatgttaaagagtatgaacgggaaaatgttgatacatttgaggcctcagtgaaagccaagcataatctaatgacagttgaacagaataatggttcatctcagaagaagttgttggcacctgatatgtttacagaatctgatgatatgtttgctgcgtattttgatagtgctcgtcttcgggccgctggcattggaaaagatttcaaagagaatcccaacctcagagataactggaccgatgcagaaggctattatcgtgtgaacataggtgaagtcctagataaacgttacaatgtgtatggctacactgggcaaggtgtattcagtaatgttgtacgagccagagataatgcaagagccaaccaagaagtggctgtaaagatcatcagaaacaatgagctcatgcaaaagactggtttaaaagaattagagttcttgaaaaaacttaatgatgctgatcctgatgacaaatttcattgtctgagactcttcaggcacttctatcacaagcagcatctttgtctggtattcgagcctctcagcatgaacttacgagaggtgttaaaaaaatatggtaaagatgttggtcttcatattaaagctgtaagatcctatagtcagcagttgttcctggcattgaaactccttaaaagatgcaatatcctacatgcagatatcaagccagacaatatcctggttaatgaatccaaaactattttaaagctttgcgattttgggtcggcttcacatgttgcggataatgacataacaccttatcttgtcagtagattttatcgtgctcctgaaatcattataggtaaaagctatgactatggtatagatatgtggtctgtaggttgcaccttatacgaactctatactggaaaaattttattccctggcaaaaccaataaccatatgctgaagcttgcaatggatctcaaaggaaagatgccaaataagatgattcgaaaaggtgtgttcaaagatcagcattttgatcaaaatctcaacttcatgtacatagaagttgataaagtaacagagagggagaaagttactgttatgagcaccattaatccaactaaggacctgttggctgacttgattgggtgccagagacttcctgaagaccaacgtaagaaagtacaccagctaaaggacttgttggaccagattctgatgttggacccagctaaacgaattagcatcaaccaggccctacagcacgccttcatccaggaaaaaatttaaacaagatgaagaaactccaagggtttgagtaaatacaaagactgaagaaatttcacagcagtttattaatgtatataaacttataaatatttctccagcaaatttgaggaagcatgatatatttgaattaacaccaagggtgatatttcttttagagatgttagttaatctgttttgtgtcttacgtgaaatttcactgtagactgttttaaattgccaagactgcacaaaattacagtgctaatgtatatggttgcagttcacataaagacaaaagcatctgttatgaaatgagtagtaatattgggtggttgatttgttcttagcagacttggcttcattttggtcttgagataaaatggccagcataaatgctgtttatattcacgttttcctaggtgtgtgtgtgcaggccacagcagcatgcccttggtgtagtcagtgccgaaaggggtctgttccttcttgagcctgcctgcagggatggtctccttttaaagcaggttgtgtgcagcattcagtacactgaaggtaagctaaaccatcaacatctctggtgttttaagatgttattttattggaacaactgacaaatgagggatgttagctttgtggcagaattccctgcatgtgtgataactgatcttgttttattttttggcattgcaactgtggcatagttacaatttctgtttgttcatcacatttaaaattggaagagaacgcgcttgatggatagagcgccttcagtgtactgtttcttattaactttactttttttaaatcaacttgctatagactttatatacattttgttaaatatagttcctagtgacatagaaacgatgcgtagttttcatttactaattacaaatgttgaggcctaattctgaaagtcctcatatttaaaggctagacaacgtaatgaaatttttaactatttgtatgtcattttgaaagtgtactgctttatggtaaaagtgtttttcatttgttcattgttttcattatttgtgatcatgttgtctttcaatacaggcataaaccttccactcttgaacaaagcagctgctttttaaaagcggtaattgcttctttaccttttatttcttttgtaaatgaagcttttctttaagaatgtgactttaaagtgttgtctattgcataaaacagttgacactcacttattgtaaagtgaagattgttctactgcatgtgaagtggaccatgcagatttctgtatgttctcagtatgcatcactagataataaagtcttttgtgaacaaggcatttgtagccatttttaaaagtttttgtcttcagtgctggtaagtcaggtaaaccataaatagttaaaagcaaccttttgtttttttcctgaaagtttttaattgaaagtattattagttaaagatgtaaacctagccaaaattaccagtttattaataattaggatcctaattatttcaaaaaatcctacaaatattgtcagctttcagtgtagtgagattattcctgtaggttatggggtataattcaggatttaactaatgtttctgctattttctcacttttccttttgatggtgcggaaagagaaaaaggaaaacggggcacaggccattcgacgccttctccaaggggtctgatttgctgagacaccagcttcaccttcttaacaaggcacctaattacaacaagcatgcacattttggtgcattcaagaatggaaaatcagaatagcagcattgattcttctggtgcagctcagtggaagatgatgacaaccagaagacatgagctaagggtaagggactgttctgaagaacctttccatttagtgatcaagatatggaagctgatttctgaaaatgctcagtgtgtactctaattatttatggtaccatttgaattgtaacttgcattttagcagtgcatgtttctaattgacttactgggaaactgaataaaatatgcctcttattatcaaaaaaaaaaaaaaagg

SEQ ID NO: 261 - DNA, 1834 bp, Homo sapiens
agacggtgctggtgactcgtccacactgctcgcttcggatactccaggcgtctcccgttgcggccgctccctgccttagaggccagccttggacacttgctgcccctttccagcccggattctgggatccttccctctgagccaacatctgggtcctgccttcgacaccaccccaaggcttcctaccttgcgtgcctggagtctgccccaggggcccttgtcctggccatggcccagaagggggtcctggggcctgggcagctgggggctgtggccattctgctctatcttggattactccggtcggggacaggagcggaaggggcagaagctccctgcggtgtggccccccaagcacgcatcacaggtggcagcagtgcagtcgccggtcagtggccctggcaggtcagcatcacctatgaaggcgtccatgtgtgtggtggctctctcgtgtctgagcagtgggtgctgtcagctgctcactgcttccccagcgagcaccacaaggaagcctatgaggtcaagctgggggcccaccagctagactcctactccgaggacgccaaggtcagcaccctgaaggacatcatcccccaccccagctacctccaggagggctcccagggcgacattgcactcctccaactcagcagacccatcaccttctcccgctacatccggcccatctgcctccctgcagccaacgcctccttccccaacggcctccactgcactgtcactggctggggtcatgtggccccctcagtgagcctcctgacgcccaagccactgcagcaactcgaggtgcctctgatcagtcgtgagacgtgtaactgcctgtacaacatcgacgccaagcctgaggagccgcactttgtccaagaggacatggtgtgtgctggctatgtggaggggggcaaggacgcctgccagggtgactctgggggcccactctcctgccctgtggagggtctctggtacctgacgggcattgtgagctggggagatgcctgtggggcccgcaacaggcctggtgtgtacactctggcctccagctatgcctcctggatccaaagcaaggtgacagaactccagcctcgtgtggtgccccaaacccaggagtcccagcccgacagcaacctctgtggcagccacctggccttcagctctgccccagcccagggcttgctgaggcccatccttttcctgcctctgggcctggctctgggcctcctctccccatggctcagcgagcactgagctggccctacttccaggatggatgcatcacactcaaggacaggagcctggtccttccctgatggcctttggacccagggcctgacttgagccactccttccttcaggactctgcgggaggctggggccccatcttgatctttgagcccattcttctgggtgtgctttttgggaccatcactgagagtcaggagttttactgcctgtagcaatggccagagcctctggcccctcacccaccatggaccagcccattggccgagctcctggggagctcctgggacccttggctatgaaaatgagccctggctcccacctgtttctggaagactgctcccggcccgcctgcccagactgatgagcacatctctctgccctctccctgtgttctgggctggggccacctttgtgcagcttcgaggacaggaaaggccccaatcttgcccactggccgctgagcgcccccgagccctgactcctggactccggaggactgagcccccaccggaactgggctggcgcttggatctggggtgggagtaacagggcagaaatgattaaaatgtttgagcac

SEQ ID NO: 262 - protein, 343 aa, Homo sapiens
MAQKGVLGPGQLGAVAILLYLGLLRSGTGAEGAEAPCGVAPQARITGGSSAVAGQWPWQVSITYEGVHVCGGSLVSEQWVLSAAHCFPSEHHKEAYEVKLGAHQLDSYSEDAKVSTLKDIIPHPSYLQEGSQGDIALLQLSRPITFSRYIRPICLPAANASFPNGLHCTVTGWGHVAPSVSLLTPKPLQQLEVPLISRETCNCLYNIDAKPEEPHFVQEDMVCAGYVEGGKDACQGDSGGPLSCPVEGLWYLTGIVSWGDACGARNRPGVYTLASSYASWIQSKVTELQPRVVPQTQESQPDSNLCGSHLAFSSAPAQGLLRPILFLPLGLALGLLSPWLSEH

SEQ ID NO: 263 - DNA, 2554 bp, Homo sapiens
gcgccatgagccggagtctcttgctccggttcttgctgttcctgctcctgctcccgccgctccccgtcctgctcgcggacccaggggcgcccacgccagtgaatccctgttgttactatccatgccagcaccagggcatctgtgtccgcttcggccttgaccgctaccagtgtgactgcacccgcacgggctattccggccccaactgcaccatccctggcctgtggacctggctccggaattcactgcggcccagcccctctttcacccacttcctgctcactcacgggcgctggttctgggagtttgtcaatgccaccttcatccgagagatgctcatgcgcctggtactcacagtgcgctccaaccttatccccagtccccccacctacaactcagcacatgactacatcagctgggagtctttctccaacgtgagctattacactcgtattctgccctctgtgcctaaagattgccccacacccatgggaaccaaagggaagaagcagttgccagatgcccagctcctggcccgccgcttcctgctcaggaggaagttcatacctgacccccaaggcaccaacctcatgtttgccttctttgcacaacacttcacccaccagttcttcaaaacttctggcaagatgggtcctggcttcaccaaggccttgggccatggggtagacctcggccacatttatggagacaatctggagcgtcagtatcaactgcggctctttaaggatgggaaactcaagtaccaggtgctggatggagaaatgtacccgccctcggtagaagaggcgcctgtgttgatgcactacccccgaggcatcccgccccagagccagatggctgtgggccaggaggtgtttgggctgcttcctgggctcatgctgtatgccacgctctggctacgtgagcacaaccgtgtgtgtgacctgctgaaggctgagcaccccacctggggcgatgagcagcttttccagacgacccgcctcatcctcataggggagaccatcaagattgtcatcgaggagtacgtgcagcagctgagtggctatttcctgcagctgaaatttgacccagagctgctgttcggtgtccagttccaataccgcaaccgcattgccatggagttcaaccatctctaccactggcaccccctcatgcctgactccttcaaggtgggctcccaggagtacagctacgagcagttcttgttcaacacctccatgttggtggactatggggttgaggccctggtggatgccttctctcgccagattgctggccggatcggtgggggcaggaacatggaccaccacatcctgcatgtggctgtggatgtcatcagggagtctcgggagatgcggctgcagcccttcaatgagtaccgcaagaggtttggcatgaaaccctacacctccttccaggagctcgtaggagagaaggagatggcagcagagttggaggaattgtatggagacattgatgcgttggagttctaccctggactgcttcttgaaaagtgccatccaaactctatctttggggagagtatgatagagattggggctcccttttccctcaagggtctcctagggaatcccatctgttctccggagtactggaagccgagcacatttggcggcgaggtgggctttaacattgtcaagacggccacactgaagaagctggtctgcctcaacaccaagacctgtccctacgtttccttccgtgtgccggatgccagtcaggatgatgggcctgctgtggagcgaccatccacagagctctgaggggcaggaaagcagcattctggaggggagagctttgtgcttgtcattccagagtgctgaggccagggctgatggtcttaaatgctcattttctggtttggcatggtgagtgttggggttgacatttagaactttaagtctcacccattatctggaatattgtgattctgtttattcttccagaatgctgaactccttgttagcccttcagattgttaggagtggttctcatttggtctgccagaatactgggttcttagttgacaacctagaatgtcagatttctggttgatttgtaacacagtcattctaggatgtggagctactgatgaaatctgctagaaagttagggggttcttattttgcattccagaatcttgactttctgattggtgattcaaagtgttgtgttccctggctgatgatccagaacagtggctcgtatcccaaatctgtcagcatctggctgtctagaatgtggatttgattcattttcctgttcagtgagatatcatagagacggagatcctaaggtccaacaagaatgcattccctgaatctgtgcctgcactgagagggcaaggaagtggggtgttcttcttgggacccccactaagaccctggtctgaggatgtagagagaacaggtgggctgtattcacgccattggttggaagctaccagagctctatccccatccaggtcttgactcatggcagctgtttctcatgaagctaataaaattcgccc

SEQ ID NO: 264 - protein, 599 aa, Homo sapiens [sequence omitted]

SEQ ID NO: 265 - DNA, 3000 bp, Homo sapiens
ccgccggccggggcgcctggctgcactcagcgccggagccgggagctagcggccgccgccatgtcccaccagaccggcatccaagcaagtgaagatgttaaagagatctttgccagagccagaaatggaaagtacagacttctgaaaatatctattgaaaatgagcaacttgtgattggatcatatagtcagccttcagattcctgggataaggattatgattcctttgttttacccctgttggaggacaaacaaccatgctatatattattcaggttagattctcagaatgcccagggatatgaatggatattcattgcatggtctccagatcattctcatgttcgtcaaaaaatgttgtatgcagcaacaagagcaactctgaagaaggaatttggaggtggccacattaaagatgaagtatttggaacagtaaaggaagatgtatcattacatggatataaaaaatacttgctgtcacaatcttcccctgccccactgactgcagctgaggaagaactacgacagattaaaatcaatgaggtacagactgacgtgggtgtggacactaagcatcaaacactacaaggagtagcatttcccatttctcgagaagcctttcaggctttggaaaaattgaataatagacagctcaactatgtgcagttggaaatagatataaaaaatgaaattataattttggccaacacaacaaatacagaactgaaagatttgccaaagaggattcccaaggattcagctcgttaccatttctttctgtataaacattcccatgaaggagactatttagagtccatagtttttatttattcaatgcctggatacacatgcagtataagagagcggatgctgtattctagctgcaagagccgtctgctagaaattgtagaaagacaactacaaatggatgtaattagaaagatcgagatagacaatggggatgagttgactgcagacttcctttatgaagaagtacatcccaagcagcatgcacacaagcaaagttttgcaaaaccaaaaggtcctgcaggaaaaagaggaattcgaagactaattaggggcccagcggaaactgaagctactactgattaaagtcatcacattaaacattgtaatactagttttttaaaagtccagcttttagtacaggagaactgaaatcattccatgttgatataaagtagggaaaaaaattgtactttttggaaaatagcacttttcacttctgtgtgtttttaaaattaatgttatagaagactcatgatttctatttttgagttaaagctagaaaagggttcaacataatgtttaattttgtcacactgttttcatagcgttgattccacacttcaaatacttcttaaaattttatacagttgggccagttctagaaagtctgatgtctcaaagggtaaacttactactttcttgtgggacagaaagaccttaaaatattcatattacttaatgaatatgttaaggaccaggctagagtattttctaagctggaaacttagtgtgccttggaaaagccgcaagttgcttactccgagtagctgtgctagctctgtcagactgtaggatcatgtctgcaacttttagaaatagtgctttatattgcagcagtcttttatatttgacttttttttaatagcattaaaattgcagatcagctcactctgaaactttaagggtaccagatattttctatactgcaggatttctgatgacattgaaagactttaaacagccttagtaaattatctttctaatgctctgtgaggccaaacatttatgttcagattgaaatttaaattaatatcattcaaaaggaaacaaaaaatgttgagttttaaaaatcaggattgacttttttctccaaaaccatacatttatgggcaaattgtgttctttatcacttccgagcaaatactcagatttaaaattactttaaagtcctggtacttaacaggctaacgtagataaacaccttaataatctcagttaatactgtatttcaaaacacatttaactgttttctaatgctttgcattatcagttacaacctagagagattttgagcctcatatttctttgatacttgaaatagagggagctagaacacttaatgtttaatctgttaaacctgctgcaagagccataactttgaggcattttctaaatgaactgtggggatccaggatttgtaatttcttgatctaaactttatgctgcataaatcacttatcggaaatgcacatttcatagtgtgaagcactcatttctaaaccttattatctaaggtaatatatgcacctttcagaaatttgtgttcgagtaagtaaagcatattagaataattgtgggttgacagatttttaaaatagaatttagagtatttggggttttgtttgtttacaaataatcagactataatatttaaacatgcaaaataactgacaataatgttgcacttgtttactaaagatataagttgttccatgggtgtacacgtagacagacacacatacacccaaattattgcattaagaatcctggagcagaccatagctgaagctgttattttcagtcaggaagactacctgtcatgaaggtataaaataatttagaagtgaatgtttttctgtaccatctatgtgcaattatactctaaattccactacactacattaaagtaaatggacattccagaatatagatgtgattatagtcttaaactaattattattaaaccaatgattgctgaaaatcagtgatgcatttgttatagagtataactcatcgtttacagtatgttttagttggcagtatcatacctagatggtgaataacatattcccagtaaatttatatagcagtgaagaattacatgccttctggtggacattttataagtgcattttatatcacaataaaaattttttctctttaaaaaaaaaaaacaagaaaaaaaaaaaa

SEQ ID NO: 266 - protein, 350 aa, Homo sapiens
MSHQTGIQASEDVKEIFARARNGKYRLLKISIENEQLVIGSYSQPSDSWDKDYDSFVLPLLEDKQPCYILFRLDSQNAQGYEWIFIAWSPDHSHVRQKMLYAATRATLKKEFGGGHIKDEVFGTVKEDVSLHGYKKYLLSQSSPAPLTAAEEELRQIKINEVQTDVGVDTKHQTLQGVAFPISREAFQALEKLNNRQLNYVQLEIDIKNEIIILANTTNTELKDLPKRIPKDSARYHFFLYKHSHEGDYLESIVFIYSMPGYTCSIRERMLYSSCKSRLLEIVERQLQMDVIRKIEIDNGDELTADFLYEEVHPKQHAHKQSFAKPKGPAGKRGIRRLIRGPAETEATTD

SEQ ID NO: 267 - DNA, 358 bp, Homo sapiens
cactccggagacggcgttggttttggggtgtggggggttggtggcactatgtggcgcgtctgtgcgcgacgggctcagaatgtagccccatgggcgggactcgaggctcggtggacggccttgcaggaggtacccggaactccacgagtgacctcgcgatctggcccggctcccgttcgtcgcaacagcgtgactacagggtatggcggggtccgggcactgtgcggctggacccccagttctggggccacgccgcggaaccgcttactgctgcagcttttggggtcgcccggccgccgctattacagtcttcccccgcatcagaaggttccattgccttctctttcccccacaatgc

SEQ ID NO: 268 - protein, 103 aa, Homo sapiens
MWRVCARRAQNVAPWAGLEARWTALQEVPGTPRVTSRSGPAPVRRNSVTTGYGGVRALCGWTPSSGATPRNRLLLQLLGSPGRRYYSLPPHQKVPLPSLSPTM

SEQ ID NO: 269 - DNA, 607 bp, Homo sapiens
ggactgttgaagacaggtctccacacacagctccagcagccacatttgcaaccttggccatctgtccagaacctgctcccacctcaggcccaggccaaccgtgcactgctgcaatgggctctgagctggagacggcgatggagaccctcatcaacgtgttccacgcccactcgggcaaagagggggacaagtacaagctgagcaagaaggagctgaaagagctgctgcagacggagctctctggcttcctggatgcccagaaggatgtggatgctgtggacaaggtgatgaaggagctagacgagaatggagacggggaggtggacttccaggagtatgtggtgcttgtggctgctctcacagtggcctgtaacaatttcttctgggagaacagttgagcagacagccacattgggcagcgcccttcctctccaccctcccagacctgcctcttccccctgcttccacctcaccccacttatccctctccataaccccacccttgcccaccccacccccacccccaccaagggcgcaagagtagcggtccaagcctgcaactcatctttcattaaaggcttctctctcaccagcaaaaaaaaaaaaa

SEQ ID NO: 270 - protein, 94 aa, Homo sapiens
MGSELETAMETLINVFHAHSGKEGDKYKLSKKELKELLQTELSGFLDAQKDVDAVDKVMKELDENGDGEVDFQEYVVLVAALTVACNNFFWENS

SEQ ID NO: 271 - DNA, 595 bp, Homo sapiens
gggcaaggctgggccgggaagggcgtgggttgaggagaggctccagacccgcacgccgcgcgcacagagctctcagcgccgctcccagccacagcctcccgcgcctcgctcagctccaacatggcaaaaatctccagccctacagagactgagcggtgcatcgagtccctgattgctgtcttccagaagtatgctggaaaggatggttataactacactctctccaagacagagttcctaagcttcatgaatacagaactagctgccttcacaaagaaccagaaggaccctggtgtccttgaccgcatgatgaagaaactggacaccaacagtgatggtcagctagatttctcagaatttcttaatctgattggtggcctagctatggcttgccatgactccttcctcaaggctgtcccttcccagaagcggacctgaggaccccttggccctggccttcaaacccaccccctttccttccagcctttctgtcatcatctccacagcccacccatcccctgagcacactaaccacctcatgcaggccccacctgccaatagtaataaagcaatgtcacttttttaaaacatgaaa

SEQ ID NO: 272 - protein, 105 aa, Homo sapiens
MAKISSPTETERCIESLIAVFQKYAGKDGYNYTLSKTEFLSFMNTELAAFTKNQKDPGVLDRMMKKLDTNSDGQLDFSEFLNLIGGLAMACHDSFLKAVPSQKRT

SEQ ID NO: 273 - DNA, 428 bp, Homo sapiens
ctgggtctgtctctgccacctggtctgccacagatccatgatgtgcagttctctggagcaggcgctggctgtgctggtcactaccttccacaagtactcctgccaagagggcgacaagttcaagctgagtaagggggaaatgaaggaacttctgcacaaggagctgcccagctttgtgggggagaaagtggatgaggaggggctgaagaagctgatgggcagcctggatgagaacagtgaccagcaggtggacttccaggagtatgctgttttcctggcactcatcactgtcatgtgcaatgacttcttccagggctgcccagaccgaccctgaagcagaactcttgacttcctgccatggatctcttgggcccaggactgttgatgcctttgagttttgtattcaataaactttttttgtctgttga

SEQ ID NO: 274 - protein, 97 aa, Homo sapiens
MCSSLEQALAVLVTTFHKYSCQEGDKFKLSKGEMKELLHKELPSFVGEKVDEEGLKKLMGSLDENSDQQVDFQEYAVFLALITVMCNDFFQGCPDRP

SEQ ID NO: 275 - DNA, 470 bp, Homo sapiens
gggaccgctataaggccagtcggactgcgacatagcccatcccctcgaccgctcgcgtcgcatttggccgcctccctaccgctccaagcccagccctcagccatggcatgccccctggatcaggccattggcctcctcgtggccatcttccacaagtactccggcagggagggtgacaagcacaccctgagcaagaaggagctgaaggagctgatccagaaggagctcaccattggctcgaagctgcaggatgctgaaattgcaaggctgatggaagacttggaccggaacaaggaccaggaggtgaacttccaggagtatgtcaccttcctgggggccttggctttgatctacaatgaagccctcaagggctgaaaataaatagggaagatggagacacctctgggggtcctctctgagtcaaatccagtggtgggtaattgtacaataaattttttttggtcaaattt

SEQ ID NO: 276 - protein, 90 aa, Homo sapiens
MACPLDQAIGLLVAIFHKYSGREGDKHTLSKKELKELIQKELTIGSKLQDAEIARLMEDLDRNKDQEVNFQEYVTFLGALALIYNEALKG

SEQ ID NO: 277 - DNA, 3151 bp, Homo sapiens
ccggccagcgggcgggctccccagccaggccgctgcacctgtcaggggaacaagctggaggagcaggaccctagacctctgcagcccataccaggtctcatggaggggaacaagctggaggagcaggactctagccctccacagtccactccagggctcatgaaggggaacaagcgtgaggagcaggggctgggccccgaacctgcggcgccccagcagcccacggcggaggaggaggccctgatcgagttccaccgctcctaccgagagctcttcgagttcttctgcaacaacaccaccatccacggcgccatccgcctggtgtgctcccagcacaaccgcatgaagacggccttctgggcagtgctgtggctctgcacctttggcatgatgtactggcaattcggcctgcttttcggagagtacttcagctaccccgtcagcctcaacatcaacctcaactcggacaagctcgtcttccccgcagtgaccatctgcaccctcaatccctacaggtacccggaaattaaagaggagctggaggagctggaccgcatcacagagcagacgctctttgacctgtacaaatacagctccttcaccactctcgtggccggctcccgcagccgtcgcgacctgcgggggactctgccgcaccccttgcagcgcctgagggtcccgcccccgcctcacggggcccgtcgagcccgtagcgtggcctccagcttgcgggacaacaacccccaggtggactggaaggactggaagatcggcttccagctgtgcaaccagaacaaatcggactgcttctaccagacatactcatcaggggtggatgcggtgagggagtggtaccgcttccactacatcaacatcctgtcgaggctgccagagactctgccatccctggaggaggacacgctgggcaacttcatcttcgcctgccgcttcaaccaggtctcctgcaaccaggcgaattactctcacttccaccacccgatgtatggaaactgctatactttcaatgacaagaacaactccaacctctggatgtcttccatgcctggaatcaacaacggtctgtccctgatgctgcgcgcagagcagaatgacttcattcccctgctgtccacagtgactggggcccgggtaatggtgcacgggcaggatgaacctgcctttatggatgatggtggctttaacttgcggcctggcgtggagacctccatcagcatgaggaaggaaaccctggacagacttgggggcgattatggcgactgcaccaagaatggcagtgatgttcctgttgagaacctttacccttcaaagtacacacagcaggtgtgtattcactcctgcttccaggagagcatgatcaaggagtgtggctgtgcctacatcttctatccgcggccccagaacgtggagtactgtgactacagaaagcacagttcctgggggtactgctactataagctccaggttgacttctcctcagaccacctgggctgtttcaccaagtgccggaagccatgcagcgtgaccagctaccagctctctgctggttactcacgatggccctcggtgacatcccaggaatgggtcttccagatgctatcgcgacagaacaattacaccgtcaacaacaagagaaatggagtggccaaagtcaacatcttcttcaaggagctgaactacaaaaccaattctgagtctccctctgtcacgatggtcaccctcctgtccaacctgggcagccagtggagcctgtggttcggctcctcggtgttgtctgtggtggagatggctgagctcgtctttgacctgctggtcatcatgttcctcatgctgctccgaaggttccgaagccgatactggtctccaggccgagggggcaggggtgctcaggaggtagcctccaccctggcatcctcccctccttcccacttctgcccccaccccatgtctctgtccttgtcccagccaggccctgctccctctccagccttgacagcccctccccctgcctatgccaccctgggcccccgcccatctccagggggctctgcaggggccagttcctccacctgtcctctgggggggccctgagagggaaggagaggtttctcacaccaaggcagatgctcctctggtgggagggtgctggccctggcaagattgaaggatgtgcagggcttcctctcagagccgcccaaactgccgttgatgtgtggaggggaagcaagatgggtaagggctcaggaagttgctccaagaacagtagctgatgaagctgcccagaagtgccttggctccagccctgtaccccttggtactgcctctgaacactctggtttccccacccaactgcggctaagtctctttttcccttggatcagccaagcgaaacttggagctttgacaaggaactttcctaagaaaccgctgataaccaggacaaaacacaaccaagggtacacgcaggcatgcacgggtttcctgcccagcgacggcttaagccagcccccgactggcctggccacactgctctccagtagcacagatgtctgctcctcctcttgaacttgggtgggaaaccccacccaaaagccccctttgttacttaggcaattccccttccctgactcccgagggctagggctagagcagacccgggtaagtaaaggcagacccagggctcctctagcctcatacccgtgccctcacagagccatgccccggcacctctgccctgtgtctttcatacctctacatgtctgcttgagatatttcctcagcctgaaagtttccccaaccatctgccagagaactcctatgcatcccttagaaccctgctcagacaccattacttttgtgaacgcttctgccacatcttgtcttccccaaaattgatcactccgccttctcctgggctcccgtagcacactataacatctgctggagtgttgctgttgcaccatactttcttgtacatttgtgtctcccttcccaactagactgtaagtgccttgcggtcagggactgaatcttgcccgtttatgtatgctccatgtctagcccatcatcctgcttggagcaagtaggcaggagctcaataaatgtttgttgcatgaaaaaaaaaaaaaaaaaa

SEQ ID NO: 278 - protein, 669 aa, Homo sapiens
MEGNKLEEQDSSPPQSTPGLMKGNKREEQGLGPEPAAPQQPTAEEEALIEFHRSYRELFEFFCNNTTIHGAIRLVCSQHNRMKTAFWAVLWLCTFGMMYWQFGLLFGEYFSYPVSLNINLNSDKLVFPAVTICTLNPYRYPEIKEELEELDRITEQTLFDLYKYSSFTTLVAGSRSRRDLRGTLPHPLQRLRVPPPPHGARRARSVASSLRDNNPQVDWKDWKIGFQLCNQNKSDCFYQTYSSGVDAVREWYRFHYINILSRLPETLPSLEEDTLGNFIFACRFNQVSCNQANYSHFHHPMYGNCYTFNDKNNSNLWMSSMPGINNGLSLMLRAEQNDFIPLLSTVTGARVMVHGQDEPAFMDDGGFNLRPGVETSISMRKETLDRLGGDYGDCTKNGSDVPVENLYPSKYTQQVCIHSCFQESMIKECGCAYIFYPRPQNVEYCDYRKHSSWGYCYYKLQVDFSSDHLGCFTKCRKPCSVTSYQLSAGYSRWPSVTSQEWVFQMLSRQNNYTVNNKRNGVAKVNIFFKELNYKTNSESPSVTMVTLLSNLGSQWSLWFGSSVLSVVEMAELVFDLLVIMFLMLLRRFRSRYWSPGRGGRGAQEVASTLASSPPSHFCPHPMSLSLSQPGPAPSPALTAPPPAYATLGPRPSPGGSAGASSSTCPLGGP

SEQ ID NO: 279 - DNA, 3174 bp, Homo sapiens
  misc_feature (1)...(3174): n = A,T,C or G
ccagcgggcgggctccccagccaggccgctgcacctgtcaggggaacaagctggaggagcaggaccctagacctctgcagcccataccaggtctcatggaggggaacaagctggaggagcaggactctagccctccacagtccactccagggctcatgaaggggaacaagcgtgaggagcaggggctgggccccgaacctgcggcgccccagcagcccacggcggaggaggaggccctgatcgagttccaccgctcctaccgagagctcttcgagttcttctgcaacaacaccaccatccacggcgccatccgcctggtgtgctcccagcacaaccgcatgaagacggccttctgggcagtgctgtggctctgcacctttggcatgatgtactggcaattcggcctgcttttcggagagtacttcagctaccccgtcagcctcaacatcaacctcaactcggacaagctcgtcttccccgcagtgaccatctgcaccctcaatccctacaggtacccggaaattaaagaggagctggaggagctggaccgcatcacagagcagacgctctttgacctgtacaaatacagctccttcaccactctcgtggccggctcccgcagccgtcgcgacctgcgggggactctgccgcaccccttgcagcgcctgagggtcccgcccccgcctcacggggcccgtcgagcccgtagcgtggcctccagcttgcgggacaacaacccccaggtggactggaaggactggaagatcggcttccagctgtgcaaccagaacaaatcggactgcttctaccagacatactcatcaggggtggatgcggtgagggagtggtaccgcttccactacatcaacatcctgtcgaggctgccagagactctgccatccctggaggaggacacgctgggcaacttcatcttcgcctgccgcttcaaccaggtctcctgcaaccaggcgaattactctcacttccaccacccgatgtatggaaactgctatactttcaatgacaagaacaactccaacctctggatgtcttccatgcctggaatcaacaacggtctgtccctgatgctgcgcgcagagcagaatgacttcattcccctgctgtccacagtgactggggcccgggtaatggtgcacgggcaggatgaacctgcctttatggatgatggtggctttaacttgcggcctggcgtggagacctccatcagcatgaggaaggaaaccctggacagacttgggggcgattatggcgactgcaccaagaatggcagtgatgttcctgttgagaacctttacccttcaaagtacacacagcaggtgtgtattcactcctgcttccaggagagcatgatcaaggagtgtggctgtgcctacatcttctatccgcggccccagaacgtggagtactgtgactacagaaagcacagttcctgggggtactgctactataagctccaggttgacttctcctcagaccacctgggctgtttcaccaagtgccggaagccatgcagcgtgaccagctaccagctctctgctggttactcacgatggccctcggtgacatcccaggaatgggtcttccagatgctatcgcgacagaacaattacaccgtcaacaacaagagaaatggagtggccaaagtcaacatcttcttcaaggagctgaactacaaaaccaattctgagtctccctctgtcacgatggtcaccctcctgtccaacctgggcagccagtggagcctgtggttcggctcctcggtgttgtctgtggtggagatggctgagctcgtctttgacctgctggtcatcatgttcctcatgctgctccgaaggttccgaagccgatactggtctccaggccgagggggcaggggtgctcaggaggtagcctccaccctggcatcctcccctccttcccacttctgcccccaccccatgtctctgtccttgtcccagccaggccctgctccctctccagccttgacagcccctccccctgcctatgccaccctgggcccccgcccatctccagggggctctgcaggggccagttcctccgcctgtcctctgggggggccctgagagggaaggagaggtttctcacaccaaggcagatgctcctctggtgggagggtgctggccctggcaagattgaaggatgtgcagggcttcctctcagagccgcccaaactgccgttgatgtgtggaggggaagcaagatgggtaagggctcaggaagttgctccaagaacagtagctgatgaagctgcccagaagtgccttggctccagccctgtaccccttggtactgcctctgaacactctggtttccccacccaactgcggctaagtctctttttcccttggatcagccaagcgaaacttggagctttgacaaggnaactttcctaagaaaccgctgataaccaggacaaaacacaaccaagggtacacgcaggcatgcacgggtttcctgcccagcgacggcttaagccagcccccgactnggcctggccacacntgctctccagtagcacnagatgtctngctcctcctcttgaacttgggtgggaaanccccacccnaaaagccccctttgttacttaggcaattccccttccctgactncccgagggctagggctagagcangacccgggtaagtaaaggcagacccagggctcctctagcctcatacccgtgccctcacangagccantgccccggncacctctgccctgtgntctttncatacctctacatgtctgcttgagatatttcctcagcctgaaagtttccccaaccatctgccagagaactcctatgcatcccttnagaaccctgctcagacaccattacttttgtgaacgcttctgccacatcttgtcttccccaaaattgatcactccgccttctccntgggctcccgtagcacactataacatctgctggagtgttgcntgttgcaccatactttcttgtacctncggcggcgaccgcsccaackrggagctsyaagtgccttgcggtcagggactgaatcttgcccgtttatgtatgctccatgtctagcccatcatcctgcttggagcaagtaggcaggagctcaataaatgtttgttgcatgaannnnnnnnnnnnnnnnnnnnnnn

SEQ ID NO: 280 - protein, 669 aa, Homo sapiens [sequence omitted]

SEQ ID NO: 281 - DNA, 2892 bp, Homo sapiens
gcggcggcggcggcggcggcaggagcccgggaggcggaggcgggaggcggcggcggcgcgcggagacgcagcagcggcagcggcagcatgtcggccggcggagcgtcagtcccgccgcccccgaaccccgccgtgtccttcccgccgccccgggtcaccctgcccgccggccccgacatcctgcggacctactcgggcgccttcgtctgcctggagattctgttcgggggtcttgtctggattttggttgcctcctccaatgttcctctacctctactacaaggatgggtcatgtttgtgtccgtgacagcgtttttcttttcgctcctctttctgggcatgttcctctctggcatggtggctcaaattgatgctaactggaacttcctggattttgcctaccattttacagtatttgtcttctattttggagcctttttattggaagcagcagccacatccctgcatgatttgcattgcaatacaaccataaccgggcagccactcctgagtgataaccagtataacataaacgtagcagcctcaatttttgcctttatgacgacagcttgttatggttgcagtttgggtctggctttacgaagatggcgaccgtaacactccttagaaactggcagtcgtatgttagtttcacttgtctactttatatgtctgatcaatttggataccattttgtccagatgcaaaaacattccaaaagtaatgtgtttagtagagagagactctaagctcaagttctggtttatttcatggatggaatgttaattttattatgatattaaagaaatggccttttattttacatctctcccctttttccctttccccctttattttcctccttttctttctgaaagtttccttttatgtccataaaatacaaatatattgttcataaaaaattagtatcccttttgtttggttgctgagtcacctgaaccttaattttaattggtaattacagcccctaaaaaaaacacatttcaaataggcttcccactaaactctatattttagtgtaaaccaggaattggcacactttttttagaatgggccagatggtaaatatttatgcttcacggtccatacagtctctgtcacaactattcagttctgctagtatagcgtgaaagcagctatacacaatacagaaatgaatgagtgtggttatgttctaataaaacttatttataaaaacaaggggaggctgggtttagcctgtgggccatagtttgtcaaccactggtgtaaaaccttagttatatatgatctgcattttcttgaactgatcattgaaaacttataaacctaacagaaaagccacataatatttagtgtcattatgcaataatcacattgcctttgtgttaatagtcaaatacttacctttggagaatacttacctttggaggaatgtataaaatttctcaggcagagtcctggatataggaaaaagtaatttatgaagtaaacttcagttgcttaatcaaactaatgatagtctaacaactgagcaagatcctcatctgagagtgcttaaaatgggatccccagagaccattaaccaatactggaactggtatctagctactgatgtcttactttgagtttatttatgcttcagaatacagttgtttgccctgtgcatgaatatacccatatttgtgtgtggatatgtgaagcttttccaaatagagctctcagaagaattaagtttttacttctaattattttgcattactttgagttaaatttgaatagagtattaaatataaagttgtagattcttatgtgtttttgtattagcccagacatctgtaatgtttttgcactggtgacagacaaaatctgttttaaaatcatatccagcacaaaaactatttctggctgaatagcacagaaaagtattttaacctacctgtagagatcctcgtcatggaaaggtgccaaactgttttgaatggaaggacaagtaagagtgaggccacagttcccaccacacgagggcttttgtattgttctactttttcagccctttactttctggctgaagcatccccttggagtgccatgtataagttgggctattagagttcatggaacatagaacaaccatgaatgagtggcatgatccgtgcttaatgatcaagtgttacttatctaataatcctctagaaagaaccctgttagatcttggtttgtgataaaaatataaagacagaagacatgaggaaaaacaaaaggtttgaggaaatcaggcatatgactttatacttaacatcagatcttttctataatatcctactactttggttttcctagctccataccacacacctaaacctgtattatgaattacatattacaaagtcataaatgtgccatatggatatacagtacattctagttggaatcgtttactctgctagaatttaggtgtgagattttttgtttcccaggtatagcaggcttatgtttggtggcattaaattggtttctttaaaatgctttggtggcacttttgtaaacagattgcttctagattgttacaaaccaagcctaagacacatctgtgaatacttagatttgtagcttaatcacattctagacttgtgagttgaatgacaaagcagttgaacaaaaattatggcatttaagaatttaacatgtcttagctgtaaaaatgagaaagtgttggttggttttaaaatctggtaactccatgatgaaaagaaatttattttatacgtgttatgtctctaataaagtattcatttgataaaaaaaaaaaaaaaaagggcggccgctctagaggatccaagcttacgtacgcgtgcatgcgacgtcatagctcttctatagtgtcaccta

SEQ ID NO: 282 - protein, 176 aa, Homo sapiens
MSAGGASVPPPPNPAVSFPPPRVTLPAGPDILRTYSGAFVCLEILFGGLVWILVASSNVPLPLLQGWVMFVSVTAFFFSLLFLGMFLSGMVAQIDANWNFLDFAYHFTVFVFYFGAFLLEAAATSLHDLHCNTTITGQPLLSDNQYNINVAASIFAFMTTACYGCSLGLALRRWRP

SEQ ID NO: 283 - DNA, 2530 bp, Homo sapiens
ggaattccctgcagcatgggctggttaactaggattgtctgtcttttctggggagtattacttacagcaagagcaaactatcagaatgggaagaacaatgtgccaaggctgaaattatcctacaaagaaatgttggaatccaacaatgtgatcactttcaatggcttggccaacagctccagttatcataccttccttttggatgaggaacggagtaggctgtatgttggagcaaaggatcacatattttcattcgacctggttaatatcaaggattttcaaaagattgtgtggccagtatcttacaccagaagagatgaatgcaagtgggctggaaaagacatcctgaaagaatgtgctaatttcatcaaggtacttaaggcatataatcagactcacttgtacgcctgtggaacgggggcttttcatccaatttgcacctacattgaaattggacatcatcctgaggacaatatttttaagctggagaactcacattttgaaaacggccgtgggaagagtccatatgaccctaagctgctgacagcatcccttttaatagatggagaattatactctggaactgcagctgattttatggggcgagactttgctatcttccgaactcttgggcaccaccacccaatcaggacagagcagcatgattccaggtggctcaatgatccaaagttcattagtgcccacctcatctcagagagtgacaatcctgaagatgacaaagtatactttttcttccgtgaaaatgcaatagatggagaacactctggaaaagctactcacgctagaataggtcagatatgcaagaatgactttggagggcacagaagtctggtgaataaatggacaacattcctcaaagctcgtctgatttgctcagtgccaggtccaaatggcattgacactcattttgatgaactgcaggatgtattcctaatgaactttaaagatcctaaaaatccagttgtatatggagtgtttacgacttccagtaacattttcaagggatcagccgtgtgtatgtatagcatgagtgatgtgagaagggtgttccttggtccatatgcccacagggatggacccaactatcaatgggtgccttatcaaggaagagtcccctatccacggccaggaacttgtcccagcaaaacatttggtggttttgactctacaaaggaccttcctgatgatgttataacctttgcaagaagtcatccagccatgtacaatccagtgtttcctatgaacaatcgcccaatagtgatcaaaacggatgtaaattatcaatttacacaaattgtcgtagaccgagtggatgcagaagatggacagtatgatgttatgtttatcggaacagatgttgggaccgttcttaaagtagtttcaattcctaaggagacttggtatgatttagaagaggttctgctggaagaaatgacagtttttcgggaaccgactgctatttcagcaatggagctttccactaagcagcaacaactatatattggttcaacggctggggttgcccagctccctttacaccggtgtgatatttacgggaaagcgtgtgctgagtgttgcctcgcccgagacccttactgtgcttgggatggttctgcatgttctcgctattttcccactgcaaagagacgcacaagacgacaagatataagaaatggagacccactgactcactgttcagacttacaccatgataatcaccatggccacagccctgaagagagaatcatctatggtgtagagaatagtagcacatttttggaatgcagtccgaagtcgcagagagcgctggtctattggcaattccagaggcgaaatgaagagcgaaaagaagagatcagagtggatgatcatatcatcaggacagatcaaggccttctgctacgtagtctacaacagaaggattcaggcaattacctctgccatgcggtggaacatgggttcatacaaactcttcttaaggtaaccctggaagtcattgacacagagcatttggaagaacttcttcataaagatgatgatggagatggctctaagaccaaagaaatgtccaatagcatgacacctagccagaaggtctggtacagagacttcatgcagctcatcaaccaccccaatctcaacacgatggatgagttctgtgaacaagtttggaaaagggaccgaaaacaacgtcggcaaaggccaggacataccccagggaacagtaacaaatggaagcacttacaagaaaataagaaaggtagaaacaggaggacccacgaatttgagagggcacccaggagtgtctgagctgcattacctctagaaacctcaaacaagtagaaacttgcctagacaataactggaaaaacaaatgcaatatacatgaacttttttcatggcattatgtggatgtttacaatggtgggaaattcagctgagttccaccaattataaattaaatccatgagtaactttcctaataggcttttttttcctaataccaccg

SEQ ID NO: 284 - protein, 771 aa, Homo sapiens [sequence omitted]

SEQ ID NO: 285 - DNA, 3041 bp, Homo sapiens
ggcaccaccactgacctgggacagtgaatcgacaatgccgtcttctgtctcgtggggcatcctcctgctggcaggcctgtgctgcctggtccctgtctccctggctgaggatccccagggagatgctgcccagaagacagatacatcccaccatgatcaggatcacccaaccttcaacaagatcacccccaacctggctgagttcgccttcagcctataccgccagctggcacaccagtccaacagcaccaatatcttcttctccccagtgagcatcgctacagcctttgcaatgctctccctggggaccaaggctgacactcacgatgaaatcctggagggcctgaatttcaacctcacggagattccggaggctcagatccatgaaggcttccaggaactcctccgtaccctcaaccagccagacagccagctccagctgaccaccggcaatggcctgttcctcagcgagggcctgaagctagtggataagtttttggaggatgttaaaaagttgtaccactcagaagccttcactgtcaacttcggggacaccgaagaggccaagaaacagatcaacgattacgtggagaagggtactcaagggaaaattgtggatttggtcaaggagcttgacagagacacagtttttgctctggtgaattacatcttctttaaaggcaaatgggagagaccctttgaagtcaaggacaccgaggaagaggacttccacgtggaccaggtgaccaccgtgaaggtgcctatgatgaagcgtttaggcatgtttaacatccagcactgtaagaagctgtccagctgggtgctgctgatgaaatacctgggcaatgccaccgccatcttcttcctgcctgatgaggggaaactacagcacctggaaaatgaactcacccacgatatcatcaccaagttcctggaaaatgaagacagaaggtctgccagcttacatttacccaaactgtccattactggaacctatgatctgaagagcgtcctgggtcaactgggcatcactaaggtcttcagcaatggggctgacctctccggggtcacagaggaggcacccctgaagctctccaaggccgtgcataaggctgtgctgaccatcgacgagaaagggactgaagctgctggggccatgtttttagaggccatacccatgtctatcccccccgaggtcaagttcaacaaaccctttgtcttcttaatgattgaacaaaataccaagtctcccctcttcatgggaaaagtggtgaatcccacccaaaaataactgcctctcgctcctcaacccctcccctccatccctggccccctccctggatgacattaaagaagggttgagctggtccctgcctgcatgtgactgtaaatccctcccatgttttctctgagtctccctttgcctgctgaggctgtatgtgggctccaggtaacagtgctgtcttcgggccccctgaactgtgttcatggagcatctggctgggtaggcacatrctgggcttgaatccaggggggactgaatcctcagcttacggacctgggcccatctgtttctggagggctccagtcttccttgtcctgtcttggagtccccaagaaggaatcacaggggaggaaccagataccagccatgaccccaggctccaccaagcatcttcatgtccccctgctcatcccccactcccccccacccagagttgctcatcctgccagggctggctgtgcccaccccaaggctgccctcctgggggccccagaactgcctgatcgtgccgtggcccagttttgtggcatctgcagcaacacaagagagaggacaatgtcctcctcttgacccgctgtcacctaaccagactcgggccctgcacctctcaggcacttctggaaaatgactgaggcagattcttcctgaagcccattctccatggggcaacaaggacacctattctgtccttgtccttccatcgctgccccagaaagcctcacatatctccgtttagaatcaggtcccttctccccagatgaagaggagggtctctgctttgttttctctatctcctcctcagacttgaccaggcccagcaggccccagaagaccattaccctatatcccttctcctccccagtcacatggccataggcctgctgatggctcaggaaggccattgcaaggactcctcagctatgggagaggaagcacatcacccattgacccccgcaacccctccctttcctcccctgagtcccgactggggccacatgcagcctgacttctttgtgcctgttgctgtccctgcagtcttcagagggccaccgcagctccagtgccacggcaggaggctgttcctgaatagcccctgtggtaagggccaggagagtccttccatcctccaaggccctgctaaaggacacagcagccaggaagtcccctgggcccctagctgaaggacagcctgctccctccgtctctaccaggaatggccttgtcctatggaaggcactgccccatcccaaactaatctaggaatcactgtctaaccactcactgtcatgaatgtgtacttaaaggatgaggttgagtcataccaaatagtgatttcgatagttcaaaatggtgaaattagcaattctacatgattcagtctaatcaatggataccgactgtttcccacacaagtctcctgttctcttaagcttactcactgacagcctttcactctccacaaatacattaaagatatggccatcaccaagccccctaggatgacaccagacctgagagtctgaagacctggatccaagttctgacttttccccctgacagctgtgtgaccttcgtgaagtcgccaaacctctctgagccccagtcattgctagtaagacctgcctttgagttggtatgatgttcaagttagataacaaaatgtttatacccattagaacagagaataaatagaactacatttcttgcaaaaaaaaaaaaaaaaaaaaaaaaaaaaaaaaaaaaaaaaaaaaaaaaa

SEQ ID NO: 286 - protein, 418 aa, Homo sapiens
MPSSVSWGILLLAGLCCLVPVSLAEDPQGDAAQKTDTSHHDQDHPTFNKITPNLAEFAFSLYRQLAHQSNSTNIFFSPVSIATAFAMLSLGTKADTHDEILEGLNFNLTEIPEAQIHEGFQELLRTLNQPDSQLQLTTGNGLFLSEGLKLVDKFLEDVKKLYHSEAFTVNFGDTEEAKKQINDYVEKGTQGKIVDLVKELDRDTVFALVNYIFFKGKWERPFEVKDTEEEDFHVDQVTTVKVPMMKRLGMFNIQHCKKLSSWVLLMKYLGNATAIFFLPDEGKLQHLENELTHDIITKFLENEDRRSASLHLPKLSITGTYDLKSVLGQLGITKVFSNGADLSGVTEEAPLKLSKAVHKAVLTIDEKGTEAAGAMFLEAIPMSIPPEVKFNKPFVFLMIEQNTKSPLFMGKVVNPTQK

SEQ ID NO: 287 - DNA, 3928 bp, Homo sapiens
  misc_feature (1)...(3928): n = A,T,C or G
cacgcgtccggcggcgggggcgaggtgaggtgttggcagtggaaaggggttcgggctcggggggcggggggacgcggagcgatggcccgcgccggccgcaggggcggataaaaagccgtcgcgctgcgggagtgggcgggagggagagggggtgtccgagggccacaagagtatgacggggctgtacgagctggtgtggcgggtgctgcacgcgctgctctgtctgcaccgcacgctcacctcctggctccgcgttcggttcggcacctggaactggatctggcggcgctgctgccgcgccgcctctgccgcggtcctagcgccgctcggcttcacgctccgcaagcccccggcagtcggcaggaaccgccgtcaccaccggcacccgcgcggggggtcgtgcctggcagccgcacaccaccggatgcgctggcgcgcggacggtcgttccttggagaagctgcctgtgcatatgggcctggtgatcaccgaggtggagcaggaacccagcttctcggacatcgcgagcctcgtggtgtggtgtatggccgtgggcatctcctacattagcgtctacgaccaccaaggtattttcaaaagaaataattccagattgatggatgaaattttaaaacaacagcaagaacttctgggcctagattgttcaaaatactcaccagaatttgcaaatagtaatgacaaagatgatcaagttttaaattgccatttggcagtgaaggtgctgtctccggaagatggaaaagcagatattgtaagagctgctcaggacttttgccagttagtagcccagaagcaaaagagacccacagatttggatgtagatacgttagccagtttacttagttcaaatggttgtcctgatcctgatttagtattgaagttcggtcctgtggacagcacattaggctttcttccctggcacatcagattgactgagattgtctctttgccttcccacctaaacatcagttatgaggactttttctctgcccttcgtcaatatgcagcctgtgaacagcgtctgggaaagtagtggtcattggttgcataatttgatttgaggcttgtggaggaaaggaaccaagtgactctgatgtttacaaagcacctatgaaaccctgtacacacctatgaaaccctgtacacacctagttcataatcctcataatttatcaacaaacacaaaaaagtgtcttacttgagagtgagtgtgtgtgtgtgcgtgtgcacgtgcacacatgtgcacgtttgtatgtatggaaataaacttataaatggggacgtattggagaaggaaatacatagacctacaactttgagcaaatagcagtgatgttttaggaactgaaatgtcacacttaaagtcttcagcccagctacttccctatttttgtggggagaagagggcctgattagaactgttctggttgtgtttggcgggaggggaataatttttgttcagtccttcttagtgaccaaactttaatttttaagaataatatattgacttactgaactgaagcattctgagttgaaaggagctccagaggagtggagttctgtgttgctcacatgttaaaatcttgctcaccttcagagcagagggaatacctatcttcagatatccgtccattttcatctcttaattgtagtcaaaagtatgacttgagagtgttgctctggtattctgggttctgaagtctggtattctggtattctgggttcaaaagtatgacttgagagtgttgctctggtattctgagagttgctctgtattctgggttctgaagattatttgaaaaataactcctactacattgaaatgcagacttaaaaatttaaacattggattaggcagtcaaaaaaaccaagcaagcataaaaggtcaataagttgtaatcttgatagtaaaggtggaaaacttattataaatggaaagaaagttttatttccttttttgtttgatgggcagtatgccatattatacccaaagttcttttaaaaaatatttccatcaaccatttttatttaaaataaacatttgagggaagttaccaaggcagcttttttcctcaaaagtaacctgttcctctttggaatagcacattttaggggcatggttaatacctgagatttttactcagtaaatcctgatggttactgtgtgtaaaatatctttaagtaggattgaaggcctctgtgggggaataaaatattaccaaagtctataaaaataaattttacatgttctcttttatgacagagagcagcactggttctgttatttttaaaatgaataattgatttcttgataggtgtttaatatttcttccctcactgctgattcttagatagaaaccattctttatatttgatagactgctttcagaaaacccttatcaacaagtgtacaatacttatctaaaactatacatttagaatggagcagtttaatactagatctcagaagttttgaaaaatagcaaagaagactggatttggaaagcatggtctacaattggttgttaaattctgaagctatgaagaataaatgtttcaactttggattatgaaaccccatttatgattttttaaatacacttgaaataaaaatgattaaactaaaaaaaaaaamarwramattactttgcactgcataatccattatacgttgtacgacttttttttttttgttttaatttattactgagagttttgtgtgaagctacagcatatctaaccagagaatttctgattccttatactgtgattatattatattgaggcatttgtagtgcagctgaagactgaatttatgccttttgtaaacatgataggtataaatgtcttataaacattctggagtatgtatagctttaatgaatgaaatttaatggacctgattaaaatgaagggatttaatcgttgttaaagttaagttagtcaaataaattacctactggaatatagcccaagccagtaaaggtttaatatttgcattttcgtgcttttattttctccttccattcataagtatatacttgaaagtacatctgtagcctatgatttgagtctcttgaagttctaggaagaggcaaactacaaactactagtattctgatttcagatgtagtcattccagaaccttctctttatgagttcacctgctagtacaatctccacaacttgaatggcattggttgttctgtaattcctgccaaaagcatcacaagttgtacatcatcaaggctccctttgcactcccaagaagaactggtaattttaaacaaaagtatgtgtctttatttgtattggaaaatactgtctataaattgtttcttgttgacactccccacaatggaaaaattaccaaattaaacctgttttatggatggcagcttggagcatagcaagaagttggaggatttgaattccattcccagttctcattgygttttgtttcttaaaactataataattggttactgttataaagtttaaaaggtggttttaatatgaatagcaaattctggtatattgtgactaacgcttaagaatgcctgtctttgagaggaaggtgttataatattaatcaacagtgccaaatacactgtgcatatctacaatttaatctttgaatgtttgttactggattagctccctcctccttctgtgtgatggtaccatgcatagagtcaatcaaatccttgtgatgttttgtatggactttgacaacatgtaactaatgtgtaaagcaagtttttatgattaaggaatcaaatttattgaattttattattgaaagttgaaacttaacatgtataaacaaaaaacaataaaataataaactattttcattgacaaaaaaaaaaraaaaaaaaaaaaaaanaaaaaaaaaaaaaaaaaa

SEQ ID NO: 288 - protein, 293 aa, Homo sapiens
MTGLYELVWRVLHALLCLHRTLTSWLRVRFGTWNWIWRRCCRAASAAVLAPLGFTLRKPPAVGRNRRHHRHPRGGSCLAAAHHRMRWRADGRSLEKLPVHMGLVITEVEQEPSFSDIASLVVWCMAVGISYISVYDHQGIFKRNNSRLMDEILKQQQELLGLDCSKYSPEFANSNDKDDQVLNCHLAVKVLSPEDGKADIVRAAQDFCQLVAQKQKRPTDLDVDTLASLLSSNGCPDPDLVLKFGPVDSTLGFLPWHIRLTEIVSLPSHLNISYEDFFSALRQYAACEQRLGK

SEQ ID NO: 289 - DNA, 936 bp, Homo sapiens
gctccgggcctggaatccctacgcgtccctttgggtttagcacgatgagctcaatcggcactgggtatgacctgtcagcctctacattctctcctgacggaagagtttttcaagttgaatatgctatgaaggctgtggaaaatagtagtacagctattggaatcagatgcaaagatggtgttgtctttggggtagaaaaattagtcctttctaaactttatgaagaaggttccaacaaaagactttttaatgttgatcggcatgttggaatggcagtagcaggtttgttggcagatgctcgttctttagcagacatagcaagagaagaagcttccaacttcagatctaactttggctacaacattccactaaaacatcttgcagacagagtggccatgtatgtgcatgcatatacactctacagtgctgttagaccttttggctgcagtgtgaatgacggtgcgcaactctacatgattgacccatcaggtgtttcatacggttattggggctgtgccatcggcaaagccaggcaagctgcaaagacggaaatagagaagcttcagatgaaagaaatgacctgccgtgatatcgttaaagaagttgcaaaaataatttacatagtacatgacgaagttaaggataaagcttttgaactagaactcagctgggttggtgaattaactaatggaagacatgaaattgttccaaaagatataagagaagaagcagagaaatatgctaaggaatctctgaaggaagaagatgaatcagatgatgataatatgtaacatttactccagcatctattgtattttaaatttctactccagtccaatgtaactatttagccctggattatacatactgtccaattttcattaaatttttgtcttataactattaaaaaaaaaaaaaaaaaaaaaaaaaaaaaaa

SEQ ID NO: 290 - protein, 248 aa, Homo sapiens
MSSIGTGYDLSASTFSPDGRVFQVEYAMKAVENSSTAIGIRCKDGVVFGVEKLVLSKLYEEGSNKRLFNVDRHVGMAVAGLLADARSLADIAREEASNFRSNFGYNIPLKHLADRVAMYVHAYTLYSAVRPFGCSVNDGAQLYMIDPSGVSYGYWGCAIGKARQAAKTEIEKLQMKEMTCRDIVKEVAKIIYIVHDEVKDKAFELELSWVGELTNGRHEIVPKDIREEAEKYAKESLKEEDESDDDNM

SEQ ID NO: 291 - DNA, 2782 bp, Homo sapiens
ggcacgaggcccacccgggctcgcgtctccgtttctccgagaggcccaaggtgtctccgccgcagcctctgtcgcgccgtgacctgtacaggtcgcgggagtcgtagggaggacgccgggacacctggaagccgagaaatggattcagtggcctttgaggatgtggctgtgaacttcaccctggaggagtgggctttgctggatccttcccagaagaatctctacagggatgtgatgcgggaaaccttcaggaacctggcttctgtaggaaaacaatgggaagaccagaacattgaagacccattcaaaattcccaggagaaatataagtcatattccagagagactctgtgaaagtaaagaaggtggtcaaggtgaagaaaccttcagccagattccagatggtattctgaacaagaaaactcctggagtaaaaccgtgtgaaagcagtgtgtgtggagaagttggcatgggtccttcatcacttaataggcacatcagagatcacactggacgtgaaccaaatgaatatcaggaatatggaaagaagtcatatacacgtaaccagtgtggacgagccttgagttatcatcgctcttttccagtacgtgaaaggactcatcctggaggaaagccctatgattgtaaggaatgtggagaaacctttatttctcttgtaagcattcgaagacacatgttaacgcataggggaggtgtaccttacaaatgtaaggtgtgtgggaaagcctttgattatcccagtttatttcgtatacatgaaagaagtcacactggagagaaaccttatgaatgcaagcaatgtgggaaagccttcagttgttccagttacattagaatacatgaaaggactcacactggagataaaccctatgaatgcaagcagtgtgggaaagctttcagttgttccaagtacattcgaatccatgaacgaactcacacaggagagaaaccctacgaatgtaaacagtgcggtaaagcctttaggtgcgccagttctgttcgaagtcacgagaggactcacaccggagagaaactttttgaatgtaaggaatgcgggaaggctttgacttgtcttgcaagtgttagaagacacatgataaagcacactggcaatggaccttataaatgtaaggtgtgtgggaaagcctttgatttccccagttcatttcgaatccatgaaaggacccacactggagagaaaccctatgattgtaagcaatgtgggaaagccttcagttgttccagttcgtttcgaaaacatgaaagaattcacactggagagaaaccctataaatgtacaaaatgtgggaaagccttcagtcgttccagttacttccgaatccatgaaagaactcacactggagagaaaccctatgaatgtaagcaatgtgggaaagccttcagtcgatccacttactttcgagtacatgaaaaaattcatactggagagaaaccctatgagaaccctaaccctaacgcttcagttgtcccagttctttcatgagcataaaaggagtcacatagagaaaccccatgaaagtaagaaatttgggaaagccttcagtcctttctgtttctttcaactacgtgaaaggattcacagtggagaaagaccctgtaagataattggctttaaattacgagagacttgtgataggacagtaaaacctagagttggagttggatctctggattgtgttatgtcagtgttggtaggttaggaactagatttcccagaatccattccatttgtgattccatgatacaattcaccagtaacctatcttacatgagattcggaagtaagttaagaaggcattagtcatggtttggaagcaccatacagggagacagctgtgtgaatacaggctgtatggacacttgcttccatcccattttcctgcttctttgggttgccaatcaagagtatcctcaaaacgacttgactttaattttctcggaggtgataggcttccacacaggtctccagaagccctgcattgaatatccatccacactttggttttccttcagacattattatgtctgtactaggcaactaattcagactgtcctggttgggaatattctgtgatgctctgactcccctagtctgtagacggaattggcatacggtctaatttgtgtagtaagcacctttgttcatactagtagtgactgtattcttgattcagcctgatagctaccatgctgctgtcaaaaccaaccagaggggagcttgttcttctgctgtagtgtgcagtgactggcctcacccaggactttgatgtgagaatgagcactttcctctatcaggaaatttcaagtgtttcctgttattcgtagctcaatgtaatgcctcagttcattttcagttgtttgattatatgtgactaatatgtattttttattcaaacaagacttctgtacatgtttcttcaaaacagtttattaactgtcttcagtcttggattacatcaagtttataattttggcaaattgttaagacactgtgaagtcagcgttaaccatgtgcatacaacttaaggaattttttcctcctcatgtaaattttacttttcatgcttatatagtttcaacttttatcttcatagtaatttctcatctactcataataccaaaagttaagtcatgctgttttgtgtgctctcttgctaaagaccgcagagaccatacctgttgtcaaagagggtgtaataaactgtaataataatcatgaccacaaaaaaaaaaaaaaaaaa

SEQ ID NO: 292 - protein, 461 aa, Homo sapiens
MDSVAFEDVAVNFTLEEWALLDPSQKNLYRDVMRETFRNLASVGKQWEDQNIEDPFKIPRRNISHIPERLCESKEGGQGEETFSQIPDGILNKKTPGVKPCESSVCGEVGMGPSSLNRHIRDHTGREPNEYQEYGKKSYTRNQCGRALSYHRSFPVRERTHPGGKPYDCKECGETFISLVSIRRHMLTHRGGVPYKCKVCGKAFDYPSLFRIHERSHTGEKPYECKQCGKAFSCSSYIRIHERTHTGDKPYECKQCGKAFSCSKYIRIHERTHTGEKPYECKQCGKAFRCASSVRSHERTHTGEKLFECKECGKALTCLASVRRHMIKHTGNGPYKCKVCGKAFDFPSSFRIHERTHTGEKPYDCKQCGKAFSCSSSFRKHERIHTGEKPYKCTKCGKAFSRSSYFRIHERTHTGEKPYECKQCGKAFSRSTYFRVHEKIHTGEKPYENPNPNASVVPVLS

SEQ ID NO: 293 - DNA, 666 bp, Homo sapiens
actgagatggcctctttaatcaaccaacttcccaggccaatctcttccctttcttttctgatagttgctgtgttggcctcatagccttacctggcataggaaagataaacaatctccttggtgtcaggatttctggtctctggctaggtttcctgcttatgcaatagtagctgggagaggccgaaagaattctggtggggccacacccactggtgaaagaataaatagtgaggtttggcattggccatcagagtcactcctgccttcaccatgaagtccagcggcctcttccccttcctggtgctgcttgccctgggaactctggcaccttgggctgtggaaggctctggaaagtgtaagttggagtcactctggtctaatctgggctgcagggtcagaggtggggtctccttgtggtgtgggtgtgtccccttctgtaggctctgatccctcagcttagtttcgggagacctccctgagggtggaatacatgtctggctgagctccaaggtttgtgtgacagtttgagcttctggaaatgcttcctctatgcagccatgctgtcagcccaggtcccactctctctctctctctctctctctctctctctctcatactccgccttcttcttcacctgtctgcgactctcaaaaaaaaaaaaaaaaa

SEQ ID NO: 294 - protein, 58 aa, Homo sapiens
MKSSGLFPFLVLLALGTLAPWAVEGSGKCKLESLWSNLGCRVRGGVSLWCGCVPFCRL

SEQ ID NO: 295 - DNA, 594 bp, Homo sapiens
gtcactcctgccttcaccatgaagtccagcggcctcttccccttcctggtgctgcttgccctgggaactctggcaccttgggctgtggaaggctctggaaagtccttcaaagctggagtctgtcctcctaagaaatctgcccagtgccttagatacaagaaacctgagtgccagagtgactggcagtgtccagggaagaagagatgttgtcctgacacttgtggcatcaaatgcctggatcctgttgacaccccaaacccaacaaggaggaagcctgggaagtgcccagtgacttatggccaatgtttgatgcttaacccccccaatttctgtgagatggatggccagtgcaagcgtgacttgaagtgttgcatgggcatgtgtgggaaatcctgcgtttcccctgtgaaagcttgattcctgccatatggaggaggctctggagtcctgctctgtgtggtccaggtcctttccaccctgagacttggctccaccactgatatcctcctttggggaaaggcttggcacacagcaggctttcaagaagtgccagttgatcaatgaataaataaacgagcctatttctctttgcac

SEQ ID NO: 296 - protein, 132 aa, Homo sapiens
MKSSGLFPFLVLLALGTLAPWAVEGSGKSFKAGVCPPKKSAQCLRYKKPECQSDWQCPGKKRCCPDTCGIKCLDPVDTPNPTRRKPGKCPVTYGQCLMLNPPNFCEMDGQCKRDLKCCMGMCGKSCVSPVKA

SEQ ID NO: 297 - DNA, 720 bp, Homo sapiens
cctgcgagctccgtcctgcctgcagcagcacaaccctgcacacccaccatggatgtcttcaagaagggcttctccatcgccaaggagggcgtggtgggtgcggtggaaaagaccaagcagggggtgacggaagcagctgagaagaccaaggagggggtcatgtatgtgggagccaagaccaaggagaatgttgtacagagcgtgacctcagtggccgagaagaccaaggagcaggccaacgcggtgagcgaggctgtggtgagcagcgtcaacactgtggccaccaagaccgtggaggaggcggagaacatcgcggtcacctccggggtggtgcgcaaggaggacttgaggccatctgccccccaacaggagggtgtggcatccaaagagaaagaggaagtggcagaggaggcccagagtgggggagactagagggctacaggccagcgtggatgacctgaagagcgctcctctgccttggacaccatcccctcctagcacaaggagtgcccgccttgagtgacatgcggctgcccacgctcctgccctcgtcttcctggccacccttggcctgtccacctgtgctgctgcaccaacctcactgccctccctcggccccacccaccctctggtccttctgaccccacttatgctgctgtgaattttttttttaaatgattccaaataaaacttgagcccactcctaaaaaaaaaaaaaaa

SEQ ID NO: 298 - protein, 127 aa, Homo sapiens
MDVFKKGFSIAKEGVVGAVEKTKQGVTEAAEKTKEGVMYVGAKTKENVVQSVTSVAEKTKEQANAVSEAVVSSVNTVATKTVEEAENIAVTSGVVRKEDLRPSAPQQEGVASKEKEEVAEEAQSGGD

SEQ ID NO: 299 - DNA, 6981 bp, Homo sapiens
ttgctgcgtcaactgtgttccctttggcctggctgagtttgatactgtggggattcagtttaggcgctggcccgaggatatcccagcggtggtacttcggagacacctgtctgcatctgactgagccggctctcctggcctcgcgctgcacattctctcctggcggcggcgccacctgcagtagcgttcgcccgaacatggcgacacggagcagcaggagggagtcgcgactcccgttcctattcaccctggtcgcactgctgccgcccggagctctctgcgaagtctggacgcagaggctgcacggcggcagcgcgcccttgccccaggaccggggcttcctcgtggtgcagggcgacccgcgcgagctgcggctgtgggcgcgcggggatgccaggggggcgagccgcgcggacgagaagccgctccggaggaaacggagcgctgccctgcagcccgagcccatcaaggtgtacggacaggttagtctgaatgattcccacaatcagatggtggtgcactgggctggagagaaaagcaacgtgatcgtggccttggcccgagatagcctggcattggcgaggcccaagagcagtgatgtgtacgtgtcttacgactatggaaaatcattcaagaaaatttcagacaagttaaactttggcttgggaaataggagtgaagctgttatcgcccagttctaccacagccctgcggacaacaagcggtacatctttgcagacgcttatgcccagtacctctggatcacgtttgacttctgcaacactcttcaaggcttttccatcccatttcgggcagctgatctcctcctacacagtaaggcctccaaccttctcttgggctttgacaggtcccaccccaacaagcagctgtggaagtcagatgactttggccagacctggatcatgattcaggaacatgtcaagtccttttcttggggaattgatccctatgacaaaccaaataccatctacattgaacgacacgaaccctctggctactccactgtcttccgaagtacagatttcttccagtcccgggaaaaccaggaagtgatccttgaggaagtgagagattttcagcttcgggacaagtacatgtttgctacaaaggtggtgcatctcttgggcagtgaacagcagtcttctgtccagctctgggtctcctttggccggaagcccatgagagcagcccagtttgtcacaagacatcctattaatgaatattacatcgcagatgcctccgaggaccaggtgtttgtgtgtgtcagccacagtaacaaccgcaccaatttatacatctcagaggcagaggggctgaagttctccctgtccttggagaacgtgctctattacagcccaggaggggccggcagtgacaccttggtgaggtattttgcaaatgaaccatttgctgacttccaccgagtggaaggattgcaaggagtctacattgctactctgattaatggttctatgaatgaggagaacatgagatcggtcatcacctttgacaaagggggaacctgggagtttcttcaggctccagccttcacgggatatggagagaaaatcaattgtgagctttcccagggctgttcccttcatctggctcagcgcctcagtcagctcctcaacctccagctccggagaatgcccatcctgtccaaggagtcggctccaggcctcatcatcgccactggctcagtgggaaagaacttggctagcaagacaaacgtgtacatctctagcagtgctggagccaggtggcgagaggcacttcctggacctcactactacacatggggagaccacggcggaatcatcacggccattgcccagggcatggaaaccaacgagctaaaatacagtaccaatgaaggggagacctggaaaacattcatcttctctgagaagccagtgtttgtgtatggcctcctcacagaacctggggagaagagcactgtcttcaccatctttggctcgaacaaagagaatgtccacagctggctgatcctccaggtcaatgccacggatgccttgggagttccctgcacagagaatgactacaagctgtggtcaccatctgatgagcgggggaatgagtgtttgctgggacacaagactgttttcaaacggcggaccccccatgccacatgcttcaatggagaggactttgacaggccggtggtcgtgtccaactgctcctgcacccgggaggactatgagtgtgacttcggtttcaagatgagtgaagatttgtcattagaggtttgtgttccagatccggaattttctggaaagtcatactcccctcctgtgccttgccctgtgggttctacttacaggagaacgagaggctaccggaagatttctggggacacttgtagcggaggagatgttgaagcgcgactggaaggagagctggtcccctgtcccctggcagaagagaacgagttcattctgtatgctgtgaggaaatccatctaccgctatgacctggcctcgggagccaccgagcagttgcctctcaccgggctacgggcagcagtggccctggactttgactatgagcacaactgtttgtattggtccgacctggccttggacgtcatccagcgcctctgtttgaatggaagcacagggcaagaggtgatcatcaattctggcctggagacagtagaagctttggcttttgaacccctcagccagctgctttactgggtagatgcaggcttcaaaaagattgaggtagctaatccagatggcgacttccgactcacaatcgtcaattcctctgtgcttgatcgtcccagggctctggtcctcgtgccccaagagggggtgatgttctggacagactggggagacctgaagcctgggatttatcggagcaatatggatggttctgctgcctatcacctggtgtctgaggatgtgaagtggcccaatggcatctctgtggacgaccagtggatttactggacggatgcctacctggagtgcatagagcggatcacgttcagtggccagcagcgctctgtcattctggacaacctcccgcacccctatgccattgctgtctttaagaatgaaatctactgggatgactggtcacagctcagcatattccgagcttccaaatacagtgggtcccagatggagattctggcaaaccagctcacggggctcatggacatgaagattttctacaaggggaagaacactggaagcaatgcctgtgtgcccaggccatgcagcctgctgtgcctgcccaaggccaacaacagtagaagctgcaggtgtccagaggatgtgtccagcagtgtgcttccatcaggggacctgatgtgtgactgccctcagggctatcagctcaagaacaatacctgtgtcaaagaagagaacacctgtcttcgcaaccagtatcgctgcagcaacgggaactgtatcaacagcatttggtggtgtgactttgacaacgactgtggagacatgagcgatgagagaaactgccctaccaccatctgtgacctggacacccagtttcgttgccaggagtctgggacttgtatcccactgtcctataaatgtgaccttgaggatgactgtggagacaacagtgatgaaagtcattgtgaaatgcaccagtgccggagtgacgagtacaactgcagttccggcatgtgcatccgctcctcctgggtatgtgacggggacaacgactgcagggactggtctgatgaagccaactgtaccgccatctatcacacctgtgaggcctccaacttccagtgccgaaacgggcactgcatcccccagcggtgggcgtgtgacggggatacggactgccaggatggttccgatgaggatccagtcaactgtgagaagaagtgcaatggattccgctgcccaaacggcacttgcatcccatccagcaaacattgtgatggtctgcgtgattgctctgatggctccgatgaacagcactgcgagcccctctgtacgcacttcatggactttgtgtgtaagaaccgccagcagtgcctgttccactccatggtctgtgacggaatcatccagtgccgcgacgggtccgatgaggatgcggcgtttgcaggatgctcccaagatcctgagttccacaaggtatgtgatgagttcggtttccagtgtcagaatggagtgtgcatcagtttgatttggaagtgcgacgggatggatgattgcggcgattattctgatgaagccaactgcgaaaaccccacagaagccccaaactgctcccgctacttccagtttcggtgtgagaatggccactgcatccccaacagatggaaatgtgacagggagaacgactgtggggactggtctgatgagaaggattgtggagattcacatattcttcccttctcgactcctgggccctccacgtgtctgcccaattactaccgctgcagcagtgggacctgcgtgatggacacctgggtgtgcgacgggtaccgagattgtgcagatggctctgacgaggaagcctgccccttgcttgcaaacgtcactgctgcctccactcccacccaacttgggcgatgtgaccgatttgagttcgaatgccaccaaccgaagacgtgtattcccaactggaagcgctgtgacggccaccaagattgccaggatggccgggacgaggccaattgccccacacacagcaccttgacttgcatgagcagggagttccagtgcgaggacggggaggcctgcattgtgctctcggagcgctgcgacggcttcctggactgctcggacgagagcgatgaaaaggcctgcagtgatgagttgactgtgtacaaagtacagaatcttcagtggacagctgacttctctggggatgtgactttgacctggatgaggcccaaaaaaatgccctctgcttcttgtgtatataatgtctactacagggtggttggagagagcatatggaagactctggagacccacagcaataagacaaacactgtattaaaagtcttgaaaccagataccacgtatcaggttaaagtacaggttcagtgtctcagcaaggcacacaacaccaatgactttgtgaccctgaggaccccagagggattgccagatgcccctcgaaatctccagctgtcactccccagggaagcagaaggtgtgattgtaggccactgggctcctcccatccacacccatggcctcatccgtgagtacattgtagaatacagcaggagtggttccaagatgtgggcctcccagagggctgctagtaactttacagaaatcaagaacttattggtcaacactctatacaccgtcagagtggctgcggtgactagtcgtggaataggaaactggagcgattctaaatccattaccaccataaaaggaaaagtgatcccaccaccagatatccacattgacagctatggtgaaaattatctaagcttcaccctgaccatggagagtgatatcaaggtgaatggctatgtggtgaaccttttctgggcatttgacacccacaagcaagagaggagaactttgaacttccgaggaagcatattgtcacacaaagttggcaatctgacagctcatacatcctatgagatttctgcctgggccaagactgacttgggggatagccctctggcatttgagcatgttatgaccagaggggttcgcccacctgcacctagcctcaaggccaaagccatcaaccagactgcagtggaatgtacctggaccggcccccggaatgtggtttatggtattttctatgccacgtcctttcttgacctctatcgcaacccgaagagcttgactacttcactccacaacaagacggtcattgtcagtaaggatgagcagtatttgtttctggtccgtgtagtggtaccctaccaggggccatcctctgactacgttgtagtgaagatgatcccggacagcaggcttccaccccgtcacctgcatgtggttcatacgggcaaaacctccgtggtcatcaagtgggaatcaccgtatgactctcctgaccaggacttgttgtatgcaattgcagtcaaagatctcataagaaagactgacaggagctacaaagtaaaatcccgtaacagcactgtggaatacacccttaacaagttggagcctggcggaaaataccacatcattgtccaactggggaacatgagcaaagattccagcataaaaattaccacagtttcattatcagcacctgatgccttaaaaatcataacagaaaatgatcatgttcttctgttttggaaaagcctggctttaaaggaaaagcattttaatgaaagcaggggctatgagatacacatgtttgatagtgccatgaatatcacagcttaccttgggaatactactgacaatttctttaaaatttccaacctgaagatgggtcataattacacgttcaccgtccaagcaagatgcctttttggcaaccagatctgtggggagcctgccatcctgctgtacgatgagctggggtctggtgcagatgcatctgcaacgcaggctgccagatctacggatgttgctgctgtggtggtgcccatcttattcctgatactgctgagcctgggggtggggtttgccatcctgtacacgaagcaccggaggctgcagagcagcttcaccgccttcgccaacagccactacagctccaggctggggtccgcaatcttctcctctggggatgacctgggggaagatgatgaagatgcccctatgataactggattttcagatgacgtccccatggtgatagcctgaaagagctttcctcactagaaaccaaatggtgtaaatattttatttgataaagatagttgatggtttattttaaaagatgcactttgagttgcaatatgttatttttatatgggccaaaaacaaaaaaaaaaaaaaaaaa

SEQ ID NO: 300 - protein, 2214 aa, Homo sapiens
MATRSSRRESRLPFLFTLVALLPPGALCEVWTQRLHGGSAPLPQDRGFLVVQGDPRELRLWARGDARGASRADEKPLRRKRSAALQPEPIKVYGQVSLNDSHNQMVVHWAGEKSNVIVALARDSLALARPKSSDVYVSYDYGKSFKKISDKLNFGLGNRSEAVIAQFYHSPADNKRYIFADAYAQYLWITFDFCNTLQGFSIPFRAADLLLHSKASNLLLGFDRSHPNKQLWKSDDFGQTWIMIQEHVKSFSWGIDPYDKPNTIYIERHEPSGYSTVFRSTDFFQSRENQEVILEEVRDFQLRDKYMFATKVVHLLGSEQQSSVQLWVSFGRKPMRAAQFVTRHPINEYYIADASEDQVFVCVSHSNNRTNLYISEAEGLKFSLSLENVLYYSPGGAGSDTLVRYFANEPFADFHRVEGLQGVYIATLINGSMNEENMRSVITFDKGGTWEFLQAPAFTGYGEKINCELSQGCSLHLAQRLSQLLNLQLRRMPILSKESAPGLIIATGSVGKNLASKTNVYISSSAGARWREALPGPHYYTWGDHGGIITAIAQGMETNELKYSTNEGETWKTFIFSEKPVFVYGLLTEPGEKSTVFTIFGSNKENVHSWLILQVNATDALGVPCTENDYKLWSPSDERGNECLLGHKTVFKRRTPHATCFNGEDFDRPVVVSNCSCTREDYECDFGFKMSEDLSLEVCVPDPEFSGKSYSPPVPCPVGSTYRRTRGYRKISGDTCSGGDVEARLEGELVPCPLAEENEFILYAVRKSIYRYDLASGATEQLPLTGLRAAVALDFDYEHNCLYWSDLALDVIQRLCLNGSTGQEVIINSGLETVEALAFEPLSQLLYWVDAGFKKIEVANPDGDFRLTIVNSSVLDRPRALVLVPQEGVMFWTDWGDLKPGIYRSNMDGSAAYHLVSEDVKWPNGISVDDQWIYWTDAYLECIERITFSGQQRSVILDNLPHPYAIAVFKNEIYWDDWSQLSIFRASKYSGSQMEILANQLTGLMDMKIFYKGKNTGSNACVPRPCSLLCLPKANNSRSCRCPEDVSSSVLPSGDLMCDCPQGYQLKNNTCVKEENTCLRNQYRCSNGNCINSIWWCDFDNDCGDMSDERNCPTTICDLDTQFRCQESGTCIPLSYKCDLEDDCGDNSDESHCEMHQCRSDEYNCSSGMCIRSSWVCDGDNDCRDWSDEANCTAIYHTCEASNFQCRNGHCIPQRWACDGDTDCQDGSDEDPVNCEKKCNGFRCPNGTCIPSSKHCDGLRDCSDGSDEQHCEPLCTHFMDFVCKNRQQCLFHSMVCDGIIQCRDGSDEDAAFAGCSQDPEFHKVCDEFGFQCQNGVCISLIWKCDGMDDCGDYSDEANCENPTEAPNCSRYFQFRCENGHCIPNRWKCDRENDCGDWSDEKDCGDSHILPFSTPGPSTCLPNYYRCSSGTCVMDTWVCDGYRDCADGSDEEACPLLANVTAASTPTQLGRCDRFEFECHQPKTCIPNWKRCDGHQDCQDGRDEANCPTHSTLTCMSREFQCEDGEACIVLSERCDGFLDCSDESDEKACSDELTVYKVQNLQWTADFSGDVTLTWMRPKKMPSASCVYNVYYRVVGESIWKTLETHSNKTNTVLKVLKPDTTYQVKVQVQCLSKAHNTNDFVTLRTPEGLPDAPRNLQLSLPREAEGVIVGHWAPPIHTHGLIREYIVEYSRSGSKMWASQRAASNFTEIKNLLVNTLYTVRVAAVTSRGIGNWSDSKSITTIKGKVIPPPDIHIDSYGENYLSFTLTMESDIKVNGYVVNLFWAFDTHKQERRTLNFRGSILSHKVGNLTAHTSYEISAWAKTDLGDSPLAFEHVMTRGVRPPAPSLKAKAINQTAVECTWTGPRNVVYGIFYATSFLDLYRNPKSLTTSLHNKTVIVSKDEQYLFLVRVVVPYQGPSSDYVVVKMIPDSRLPPRHLHVVHTGKTSVVIKWESPYDSPDQDLLYAIAVKDLIRKTDRSYKVKSRNSTVEYTLNKLEPGGKYHIIVQLGNMSKDSSIKITTVSLSAPDALKIITENDHVLLFWKSLALKEKHFNESRGYEIHMFDSAMNITAYLGNTTDNFFKISNLKMGHNYTFTVQARCLFGNQICGEPAILLYDELGSGADASATQAARSTDVAAVVVPILFLILLSLGVGFAILYTKHRRLQSSFTAFANSHYSSRLGSAIFSSGDDLGEDDEDAPMITGFSDDVPMVIA

SEQ ID NO: 301 - DNA, 1544 bp, Homo sapiens
  misc_feature (1)...(1544): n = A,T,C or G
gcacgagttgggaggtgtagcgcggctctgaacgcgctgagggccgttgagtgtcgcaggcggcgagggcgcgagtgaggagcagacccaggcatcgcgcgccgagaaggccgggcgtccccacactgaaggtccggaaaggcgacttccgggggctttggcacctggcggaccctcccggagcgtcggcacctgaacgcgaggcgctccattgcgcgtgcgcgttgaggggcttcccgcacctgatcgcgagaccccaacggctggtggcgtcgcctgcgcgtctcggctgagctggccatggcgcagctgtgcgggctgaggcggagccgggcgtttctcgccctgctgggatcgctgctcctctctggggtcctggcggccgaccgagaacgcagcatccacgacttctgcctggtgtcgaaggtggtgggcagatgccgggcctccatgcctaggtggtggtacaatgtcactgacggatcctgccagctgtttgtgtatgggggctgtgacggaaacagcaataattacctgaccaaggaggagtgcctcaagaaatgtgccactgtcacagagaatgccacgggtgacctggccaccagcaggaatgcagcggattcctctgtcccaagtgctcccagaaggcaggattctgaagaccactccagcgatatgttcaactatgaagaatactgcaccgccaacgcagtcactgggccttgccgtgcatccttcccacgctggtactttgacgtggagaggaactcctgcaataacttcatctatggaggctgccggggcaataagaacagctaccgctctgaggaggcctgcatgctccgctgcttccgccagcaggagaatcctcccctgccccttggctcaaaggtggtggttctggcggggctgttcgtgatggtgttgatcctcttcctgggagcctccatggtctacctgatccgggtggcacggaggaaccaggagcgtgccctgcgcaccgtctggagctccggagatgacaaggagcagctggtgaagaacacatatgtcctgtgaccgccctgtcgccaagaggactggggaagggaggggagactatgtgtgagctttttttaaatagagggattgactcggatttgagtgatcattagggctgaggtctgtttctctgggaggtaggacggctgcttcctggtctggcagggatgggtttgctttggaaatcctctaggaggctcctcctcgcatggcctgcagtctggcagcagccccgagttgtttcctcgctgatcgatttctttcctccaggtagagttttctttgcttatgttgaattccattgcctccttttctcnatcacagaagtgatgttggaatcgtttcttttgtttgtctgatttatggtttttttaagtataaacaaaagttttttattagcattctgaaagaaggaaagtaaaatgtacaagtttaataaaaaggggccttcccctttagaataaatttccagcatgttgctttcaaaaaaaaaaaaaaaaaaa

SEQ ID NO: 302 - protein, 252 aa, Homo sapiens
MAQLCGLRRSRAFLALLGSLLLSGVLAADRERSIHDFCLVSKVVGRCRASMPRWWYNVTDGSCQLFVYGGCDGNSNNYLTKEECLKKCATVTENATGDLATSRNAADSSVPSAPRRQDSEDHSSDMFNYEEYCTANAVTGPCRASFPRWYFDVERNSCNNFIYGGCRGNKNSYRSEEACMLRCFRQQENPPLPLGSKVVVLAGLFVMVLILFLGASMVYLIRVARRNQERALRTVWSSGDDKEQLVKNTYVL

SEQ ID NO: 303 - DNA, 1558 bp, Homo sapiens
  misc_feature (1)...(1558): n = A,T,C or G
agggagtcgacccacgcgtccgggcgacctccgcgcgttgggaggtgtaggcgcggctctgaacgcgctgagggccgttgagtgtcgcaggcggcgagggcgcgagtgaggagcagacccaggcatcgcgcgccgagaaggccgggcgtccccacactgaaggtccggaaaggcgacttccgggggctttggcacctggcggaccctcccggagcgtcggcacctgaacgcgaggcgctccattgcgcgtgcgcgttgaggggcttcccgcacctgatcgcgagaccccaacggctggtggcgtcgcctgcgcgtctcggctgagctggccatggcgcagctgtgcgggctgaggcggagccgggcgtttctcgccctgctgggatcgctgctcctctctggggtcctggcggccgaccgagaacgcagcatccacgagaatgccacgggtgacctggccaccagcaggaatgcagcggattcctctgtcccaagtgctcccagaaggcaggattctgaagaccactccagcgatatgttcaactatgaagaatactgcaccgccaacgcagtcactgggccttgccgtgcatccttcccacgctggtactttgacgtggagaggaactcctgcaataacttcatctatggaggctgccggggcaataagaacagctaccgctctgaggaggcctgcatgctccgctgcttccgccagcaggagaatcctcccctgccccttggctcaaaggtggtgsttctggcggggctgttcgtgatggtgttgatcctcttcctgggagcctccatggtctacctgatccgggtggcacggaggaaccaggagcgtgccctgcgcaccgtctggagctccggagatgacaaggagcagctggtgaagaacacatatgtcctgtgaccgccctgtcgccaagaggactggggaagggaggggagactatgtgtgagctttttttaaatagagggattgactcggatttgagtgatcattagggctgaggtctgtttctctgggaggtaggacggctgcttcctggtctggcagggatgggtttgctttggaaatcctctaggaggctcctcctcgcatggcctgcagtctggcagcagccccgagttgtttcctcgctgatcgatttctttcctccaggtagagttttctttgcttatgttgaattccattgcctcttttctcatcacagaagtgatgttggaatcgtttcttttgtttgtctgatttatggtttttttaagtataaacaaaagttttttattagcattctgaaagaaggaaagtaaaatgtacctncgcccgnnncganccrctcgamcbttccchhtaraawaaawwwmarmawrtgctttctttatgggagtcctaatttcaaccctaccaaaatgatcacaagacactatctgaggtgtcccattctagaaatagacccctcaaaatagcgtctttcagatctttttgaatgaatccacaagatgaaataaatgtcctattactgaaaaaaaaaaaaaaaagggcggccgc

SEQ ID NO: 304 - protein, 195 aa, Homo sapiens
  VARIANT (1)...(195): Xaa = Any Amino Acid
MAQLCGLRRSRAFLALLGSLLLSGVLAADRERSIHENATGDLATSRNAADSSVPSAPRRQDSEDHSSDMFNYEEYCTANAVTGPCRASFPRWYFDVERNSCNNFIYGGCRGNKNSYRSEEACMLRCFRQQENPPLPLGSKVVXLAGLFVMVLILFLGASMVYLIRVARRNQERALRTVWSSGDDKEQLVKNTYVL

SEQ ID NO: 305 - DNA, 3079 bp, Homo sapiens
ggcacaaagttgggggccgcgaagatgaggctgtccccggcgcccctgaagctgagccggactccggcactgctggccctggcgctgcccctggccgcggcgctggccttctccgacgagaccctggacaaagtgcccaagtcagagggctactgtagccgtatcctgcgcgcccagggcacgcggcgcgagggctacaccgagttcagcctccgcgtggagggcgaccccgacttctacaagccgggaaccagctaccgcgtaacactttcagctgctcctccctcctacttcagaggattcacattaattgccctcagagagaacagagagggtgataaggaagaagaccatgctgggaccttccagatcatagacgaagaagaaactcagtttatgagcaattgccctgttgcagtcactgaaagcactccacggaggaggacccggatccaggtgttttggatagcaccaccagcgggaacaggctgcgtgattctgaaggccagcatcgtacaaaaacgcattatttattttcaagatgagggctctctgaccaagaaactttgtgaacaagattccacatttgatggggtgactgacaaacccatcttagactgctgtgcctgcggaactgccaagtacagactcacattttatgggaattggtccgagaagacacacccaaaggattaccctcgtcgggccaaccactggtctgcgatcatcggaggatcccactccaagaattatgtactgtgggaatatggaggatatgccagcgaaggcgtcaaacaagttgcagaattgggctcacccgtgaaaatggaggaagaaattcgacaacagagtgatgaggtcctcaccgtcatcaaagccaaagcccaatggccagcctggcagcctctcaacgtgagagcagcaccttcagctgaattttccgtggacagaacgcgccatttaatgtccttcctgaccatgatgggccctagtcccgactggaacgtaggcttatctgcagaagatctgtgcaccaaggaatgtggctgggtccagaaggtggtgcaagacctgattccctgggacgctggcaccgacagcggggtgacctatgagtcacccaacaaacccaccattccccaggagaaaatccggcccctgaccagcctggaccatcctcagagtcctttctatgacccagagggtgggtccatcactcaagtagccagagttgtcatcgagagaatcgcacggaagggtgaacaatgcaatattgtacctgacaatgtcgatgatattgtagctgacctggctccagaagagaaagatgaagatgacacccctgaaacctgcatctactccaactggtccccatggtccgcctgcagctcctccacctgtgacaaaggcaagaggatgcgacagcgcatgctgaaagcacagctggacctcagcgtcccctgccctgacacccaggacttccagccctgcatgggccctggctgcagtgacgaagacggctccacctgcaccatgtccgagtggatcacctggtcgccctgcagcatctcctgcggcatgggcatgaggtcccgggagaggtatgtgaagcagttcccggaggacggctccgtgtgcacgctgcccactgaggaaatggagaagtgcacggtcaacgaggagtgctctcccagcagctgcctgatgaccgagtggggcgagtgggacgagtgcagcgccacctgcggcatgggcatgaagaagcggcaccgcatgatcaagatgaaccccgcagatggctccatgtgcaaagccgagacatcacaggcagagaagtgcatgatgccagagtgccacaccatcccatgcttgctgtccccatggtccgagtggagtgactgcagcgtgacctgcgggaagggcatgcgaacccgacagcggatgctcaagtctctggcagaacttggagactgcaatgaggatctggagcaggtggagaagtgcatgctccctgaatgccccattgactgtgagctcaccgagtggtcccagtggtcggaatgtaacaagtcatgtgggaaaggccacgtgattcgaacccggatgatccaaatggagcctcagtttggaggtgcaccctgcccagagactgtgcagcgaaaaaagtgccgcatccgaaaatgccttcgaaatccatccatccaaaagccacgctggagggaggcccgagagagccggcggagtgagcagctgaaggaagagtctgaaggggagcagttcccaggttgtaggatgcgcccatggacggcctggtcagaatgcaccaaactgtgcggaggtggaattcaggaacgttacatgactgtaaagaagagattcaaaagctcccagtttaccagctgcaaagacaagaaggagatcagagcatgcaatgttcatccttgttagcaagggtacgagttccccagggctgcactctagattccagagtcaccaatggctggattatttgcttgtttaagacaatttaaattgtgtacgctagttttcatttttgcagtgtggttcgcccagtagtcttgtggatgccagagacatcctttctgaatacttcttgatgggtacaggctgagtggggcgccctcacctccagccagcctcttcctgcagaggagtagtgtcagccaccttgtactaagctgaaacatgtccctctggagcttccacctggccagggaggacggagactttgacctactccacatggagaggcaaccatgtctggaagtgactatgcctgagtcccagggtgcggcaggtaggaaacattcacagatgaagacagcagattccccacattctcatctttggcctgttcaatgaaaccattgtttgcccatctcttcttagtggaactttaggtctcttttcaagtctcctcagtcatcaatagttcctggggaaaaacagagctggtagacttgaagaggagcattgatgttgggtggcttttgttctttcactgagaaattcggaatacatttgtctcacccctgatattggttcctgatgccccagc

SEQ ID NO: 306 - protein, 807 aa, Homo sapiens [sequence omitted]

SEQ ID NO: 307 - DNA, 5108 bp, Homo sapiens
gcgagtcgatacagtaagtaagccgccaagcatattgctaggcacagagcaggtgtgcaacaaaagttatttctcaggctttccctcctctgagcgccgtcctccagagggtccggagtgtagctgggggttggagcagcagcctcctaggcgatgggacagagcccacagggtccggtatgccacggtttcttcgtcagaccctgggaatccaacgtcgcaaaataaacacggccgcgccgctaatcgccagttcggaggaaacaaaacagcgctgcgctgggggatctgggcaaaatcagccctccctcctcccgctccttcgccgcggccctcccctcctcgcgctgctctcgttcgcttggctcagctcagctcagctcagcgcagctccgcggccgccaagccgaggcgggcacggtctccgagtcgcggacgccagctccgagctccctctctccgccgcgcctccgccaggtcgcgccttcgtcgggaccacttcgggcaggagtcgcgtggcgaaggcctgcggccgcggcacaaagttgggggccgcgaagatgaggctgtccccggcgcccctgaagctgagccggactccggcactgctggccctggcgctgcccctggccgcggcgctggccttctccgacgagaccctggacaaagtgcccaagtcagagggctactgcagccgtatcctgcgcgcccagggcacgcggcgcgagggctacaccgagttcagcctccgcgtggagggcgaccccgacttctacaagccgggaaccagctaccgcgtaacactttcagctgctcctccctcctacttcagaggattcacattaattgccctcagagagaacagagagggtgataaggaagaagaccatgctgggaccttccagatcatagacgaagaagaaactcagtttatgagcaattgccctgttgcagtcactgaaagcactccacggaggaggacccggatccaggtgttttggatagcaccaccagcgggaacaggctgcgtgattctgaaggccagcatcgtacaaaaacgcattatttattttcaagatgagggctctctgaccaagaaactttgtgaacaagattccacatttgatggggtgactgacaaacccatcttagactgctgtgcctgcggaactgccaagtacagactcacattttatgggaattggtccgagaagacacacccaaaggattaccctcgtcgggccaaccactggtctgcgatcatcggaggatcccactccaagaattatgtactgtgggaatatggaggatatgccagcgaaggcgtcaaacaagttgcagaattgggctcacccgtgaaaatggaggaagaaattcgacaacagagtgatgaggtcctcaccgtcatcaaagccaaagcccaatggccagcctggcagcctctcaacgtgagagcagcaccttcagctgaattttccgtggacagaacgcgccatttaatgtccttcctgaccatgatgggccctagtcccgactggaacgtaggcttatctgcagaagatctgtgcaccaaggaatgtggctgggtccagaaggtggtgcaagacctgattccctgggacgctggcaccgacagcggggtgacctatgagtcacccaacaaacccaccattccccaggagaaaatccggcccctgaccagcctggaccatcctcagagtcctttctatgacccagagggtgggtccatcactcaagtagccagagttgtcatcgagagaatcgcacggaagggtgaacaatgcaatattgtacctgacaatgtcgatgatattgtagctgacctggctccagaagagaaagatgaagatgacacccctgaaacctgcatctactccaactggtccccatggtccgcctgcagctcctccacctgtgacaaaggcaagaggatgcgacagcgcatgctgaaagcacagctggacctcagcgtcccctgccctgacacccaggacttccagccctgcatgggccctggctgcagtgacgaagacggctccacctgcaccatgtccgagtggatcacctggtcgccctgcagcatctcctgcggcatgggcatgaggtcccgggagaggtatgtgaagcagttcccggaggacggctccgtgtgcacgctgcccactgaggaaacggagaagtgcacggtcaacgaggagtgctctcccagcagctgcctgatgaccgagtggggcgagtgggacgagtgcagcgccacctgcggcatgggcatgaagaagcggcaccgcatgatcaagatgaaccccgcagatggctccatgtgcaaagccgagacatcacaggcagagaagtgcatgatgccagagtgccacaccatcccatgcttgctgtccccatggtccgagtggagtgactgcagcgtgacctgcgggaagggcatgcgaacccgacagcggatgctcaagtctctggcagaacttggagactgcaatgaggatctggagcaggtggagaagtgcatgctccctgaatgccccattgactgtgagctcaccgagtggtcccagtggtcggaatgtaacaagtcatgtgggaaaggccacgtgattcgaacccggatgatccaaatggagcctcagtttggaggtgcaccctgcccagagactgtgcagcgaaaaaagtgccgcatccgaaaatgccttcgaaatccatccatccaaaagctacgctggagggaggcccgagagagccggcggagtgagcagctgaaggaagagtctgaaggggagcagttcccaggttgtaggatgcgcccatggacggcctggtcagaatgcaccaaactgtgcggaggtggaattcaggaacgttacatgactgtaaagaagagattcaaaagctcccagtttaccagctgcaaagacaagaaggagatcagagcatgcaatgttcatccttgttagcaagggtacgagttccccagggctgcactctagattccagagtcaccaatggctggattatttgcttgtttaagacaatttaaattgtgtacgctagttttcatttttgcagtgtggttcgcccagtagtcttgtggatgccagagacatcctttctgaatacttcttgatgggtacaggctgagtggggcgccctcacctccagccagcctcttcctgcagaggagtagtgtcagccaccttgtactaagctgaaacatgtccctctggagcttccacctggccagggaggacggagactttgacctactccacatggagaggcaaccatgtctggaagtgactatgcctgagtcccagggtgcggcaggtaggaaacattcacagatgaagacagcagattccccacattctcatctttggcctgttcaatgaaaccattgtttgcccatctcttcttagtggaactttaggtctcttttcaagtctcctcagtcatcaatagttcctggggaaaaacagagctggtagacttgaagaggagcattgatgttgggtggcttttgttctttcactgagaaattcggaatacatttgtctcacccctgatattggttcctgatgcccccccaacaaaaataaataaataaattatggctgctttatttaaatataaggtagctagtttttacacctgagataaataataagcttagagtgtatttttcccttgcttttgggggttcagaggagtatgtacaattcttctgggaagccagccttctgaactttttggtactaaatccttattggaaccaagacaaaggaagcaaaattggtctctttagagaccaatttgcctaaattttaaaatcttcctacacacatctagacgttcaagtttgcaaatcagtttttagcaagaaaacatttttgctatacaaacattttgctaagtctgcccaaagcccccccaatgcattccttcaacaaaatacaatctctgtactttaaagttattttagtcatgaaattttatatgcagagagaaaaagttaccgagacagaaaacaaatctaagggaaaggaatattatgggattaagctgagcaagcaattctggtggaaagtcaaacctgtcagtgctccacaccagggctgtggtcctcccagacatgcataggaatggccacaggtttacactgccttcccagcaattataagcacaccagattcagggagactgaccaccaagggatagtgtaaaaggacattttctcagttgggtccatcagcagtttttcttcctgcatttattgttgaaaactattgtttcatttcttcttttataggccttattactgcttaatccaaatgtgtaccattggtgagacacatacaatgctctgaatacactacgaatttgtattaaacacatcagaatatttccaaatacaacatagtatagtcctgaatatgtacttttaacacaagagagactattcaataaaaactcactgggtctttcatgtctttaagctaagtaagtgttcagaaggttcttttttatattgtcctccacctccatcattttcaataaaagatagggcttttgctcccttgttcttggagggaccattattacatctctgaactacctttgtatccaacatgttttaaatccttaaatgaattgctttctcccaaaaaaagcacaatataaagaaacacaagatttaattatttttctacttggggggaaaaaagtcctcatgtagaagcacccacttttgcaatgttgttctaagctatctatctaactctcagcccatgataaagttccttaagctggtgattcctaatcaaggacaagccaccctagtgtctcatgtttgtatttggtcccagttgggtacattttaaaatcctgattttggagacttaaaaccaggttaatggctaagaatgggtaacatgactcttgttggattgttattttttgtttgcaatggggaatttataagaagcatcaagtctctttcttaccaaagtcttgttaggtggtttatagttcttttggctaacaaatcattttggaaataaagattttttactacaaaaatg

SEQ ID NO: 308 - protein, 934 aa, Homo sapiens [sequence omitted]

SEQ ID NO: 309 - DNA, 5471 bp, Homo sapiens
gcgagtcgatacagtaagtaagccgccaagcatattgctaggcacagagcaggtgtgcaacaaaagttatttctcaggctttccctcctctgagcgccgtcctccagagggtccggagtgtagctgggggttggagcagcagcctcctaggcgatgggacagagcccacagggtccggtatgccacggtttcttcgtcagaccctgggaatccaacgtcgcaaaataaacacggccgcgccgctaatcgccagttcggaggaaacaaaacagcgctgcgctgggggatctgggcaaaatcagccctccctcctcccgctccttcgccgcggccctcccctcctcgcgctgctctcgttcgcttggctcagctcagctcagctcagcgcagctccgcggccgccaagccgaggcgggcacggtctccgagtcgcggacgccagctccgagctccctctctccgccgcgcctccgccaggtcgcgccttcgtcgggaccacttcgggcaggagtcgcgtggcgaaggcctgcggccgcggcacaaagttgggggccgcgaagatgaggctgtccccggcgcccctgaagctgagccggactccggcactgctggccctggcgctgcccctggccgcggcgctggccttctccgacgagaccctggacaaagtgcccaagtcagagggctactgcagccgtatcctgcgcgcccagggcacgcggcgcgagggctacaccgagttcagcctccgcgtggagggcgaccccgacttctacaagccgggaaccagctaccgcgtaacactttcagctgctcctccctcctacttcagaggattcacattaattgccctcagagagaacagagagggtgataaggaagaagaccatgctgggaccttccagatcatagacgaagaagaaactcagtttatgagcaattgccctgttgcagtcactgaaagcactccacggaggaggacccggatccaggtgttttggatagcaccaccagcgggaacaggctgcgtgattctgaaggccagcatcgtacaaaaacgcattatttattttcaagatgagggctctctgaccaagaaactttgtgaacaagattccacatttgatggggtgactgacaaacccatcttagactgctgtgcctgcggaactgccaagtacagactcacattttatgggaattggtccgagaagacacacccaaaggattaccctcgtcgggccaaccactggtctgcgatcatcggaggatcccactccaagaattatgtactgtgggaatatggaggatatgccagcgaaggcgtcaaacaagttgcagaattgggctcacccgtgaaaatggaggaagaaattcgacaacagagtgatgaggtcctcaccgtcatcaaagccaaagcccaatggccagcctggcagcctctcaacgtgagagcagcaccttcagctgaattttccgtggacagaacgcgccatttaatgtccttcctgaccatgatgggccctagtcccgactggaacgtaggcttatctgcagaagatctgtgcaccaaggaatgtggctgggtccagaaggtggtgcaagacctgattccctgggacgctggcaccgacagcggggtgacctatgagtcacccaacaaacccaccattccccaggagaaaatccggcccctgaccagcctggaccatcctcagagtcctttctatgacccagagggtgggtccatcactcaagtagccagagttgtcatcgagagaatcgcacggaagggtgaacaatgcaatattgtacctgacaatgtcgatgatattgtagctgacctggctccagaagagaaagatgaagatgacacccctgaaacctgcatctactccaactggtccccatggtccgcctgcagctcctccacctgtgacaaaggcaagaggatgcgacagcgcatgctgaaagcacagctggacctcagcgtcccctgccctgacacccaggacttccagccctgcatgggccctggctgcagtgacgaagacggctccacctgcaccatgtccgagtggatcacctggtcgccctgcagcatctcctgcggcatgggcatgaggtcccgggagaggtatgtgaagcagttcccggaggacggctccgtgtgcacgctgcccactgaggaaacggagaagtgcacggtcaacgaggagtgctctcccagcagctgcctgatgaccgagtggggcgagtgggacgagtgcagcgccacctgcggcatgggcatgaagaagcggcaccgcatgatcaagatgaaccccgcagatggctccatgtgcaaagccgagacatcacaggcagagaagtgcatgatgccagagtgccacaccatcccatgcttgctgtccccatggtccgagtggagtgactgcagcgtgacctgcgggaagggcatgcgaacccgacagcggatgctcaagtctctggcagaacttggagactgcaatgaggatctggagcaggtggagaagtgcatgctccctgaatgccccattgactgtgagctcaccgagtggtcccagtggtcggaatgtaacaagtcatgtgggaaaggccacgtgattcgaacccggatgatccaaatggagcctcagttcctccaaagccttcttgagtcatagagggagcatagaatgggtgatgacctggcaccaatcctgcctctgctgcttaccaaccacacgggctgaagtcagcctgcctctttggagcctcagtttcttcttctgtaaaatagcatgacacagcacctgctttgcatccctcataggcttgttgagatgttcaaaggagagcgtgaccatatcttgtttcagacatgtgatacactcatgcccatctgtgtcttgccagccattgactgtgagctcaccgagtggtcccagtggtcggaatgtaacaagtcatgtgggaaaggccacgtgattcgaacccggatgatccaaatggagcctcagtttggaggtgcaccctgcccagagactgtgcagcgaaaaaagtgccgcatccgaaaatgccttcgaaatccatccatccaaaagctacgctggagggaggcccgagagagccggcggagtgagcagctgaaggaagagtctgaaggggagcagttcccaggttgtaggatgcgcccatggacggcctggtcagaatgcaccaaactgtgcggaggtggaattcaggaacgttacatgactgtaaagaagagattcaaaagctcccagtttaccagctgcaaagacaagaaggagatcagagcatgcaatgttcatccttgttagcaagggtacgagttccccagggctgcactctagattccagagtcaccaatggctggattatttgcttgtttaagacaatttaaattgtgtacgctagttttcatttttgcagtgtggttcgcccagtagtcttgtggatgccagagacatcctttctgaatacttcttgatgggtacaggctgagtggggcgccctcacctccagccagcctcttcctgcagaggagtagtgtcagccaccttgtactaagctgaaacatgtccctctggagcttccacctggccagggaggacggagactttgacctactccacatggagaggcaaccatgtctggaagtgactatgcctgagtcccagggtgcggcaggtaggaaacattcacagatgaagacagcagattccccacattctcatctttggcctgttcaatgaaaccattgtttgcccatctcttcttagtggaactttaggtctcttttcaagtctcctcagtcatcaatagttcctggggaaaaacagagctggtagacttgaagaggagcattgatgttgggtggcttttgttctttcactgagaaattcggaatacatttgtctcacccctgatattggttcctgatgcccccccaacaaaaataaataaataaattatggctgctttatttaaatataaggtagctagtttttacacctgagataaataataagcttagagtgtatttttcccttgcttttgggggttcagaggagtatgtacaattcttctgggaagccagccttctgaactttttggtactaaatccttattggaaccaagacaaaggaagcaaaattggtctctttagagaccaatttgcctaaattttaaaatcttcctacacacatctagacgttcaagtttgcaaatcagtttttagcaagaaaacatttttgctatacaaacattttgctaagtctgcccaaagcccccccaatgcattccttcaacaaaatacaatctctgtactttaaagttattttagtcatgaaattttatatgcagagagaaaaagttaccgagacagaaaacaaatctaagggaaaggaatattatgggattaagctgagcaagcaattctggtggaaagtcaaacctgtcagtgctccacaccagggctgtggtcctcccagacatgcataggaatggccacaggtttacactgccttcccagcaattataagcacaccagattcagggagactgaccaccaagggatagtgtaaaaggacattttctcagttgggtccatcagcagtttttcttcctgcatttattgttgaaaactattgtttcatttcttcttttataggccttattactgcttaatccaaatgtgtaccattggtgagacacatacaatgctctgaatacactacgaatttgtattaaacacatcagaatatttccaaatacaacatagtatagtcctgaatatgtacttttaacacaagagagactattcaataaaaactcactgggtctttcatgtctttaagctaagtaagtgttcagaaggttcttttttatattgtcctccacctccatcattttcaataaaagatagggcttttgctcccttgttcttggagggaccattattacatctctgaactacctttgtatccaacatgttttaaatccttaaatgaattgctttctcccaaaaaaagcacaatataaagaaacacaagatttaattatttttctacttggggggaaaaaagtcctcatgtagaagcacccacttttgcaatgttgttctaagctatctatctaactctcagcccatgataaagttccttaagctggtgattcctaatcaaggacaagccaccctagtgtctcatgtttgtatttggtcccagttgggtacattttaaaatcctgattttggagacttaaaaccaggttaatggctaagaatgggtaacatgactcttgttggattgttattttttgtttgcaatggggaatttataagaagcatcaagtctctttcttaccaaagtcttgttaggtggtttatagttcttttggctaacaaatcattttggaaataaagattttttactacaaaaatg

SEQ ID NO: 310 - protein, 835 aa, Homo sapiens
MPRFLRQTLGIQRRKINTAAPLIASSEETKQRCAGGSGQNQPSLLPLLRRGPPLLALLSFAWLSSAQLSAAPRPPSRGGHGLRVADASSELPLSAAPPPGRAFVGTTSGRSRVAKACGRGTKLGAAKMRLSPAPLKLSRTPALLALALPLAAALAFSDETLDKVPKSEGYCSRILRAQGTRREGYTEFSLRVEGDPDFYKPGTSYRVTLSAAPPSYFRGFTLIALRENREGDKEEDHAGTFQIIDEEETQFMSNCPVAVTESTPRRRTRIQVFWIAPPAGTGCVILKASIVQKRIIYFQDEGSLTKKLCEQDSTFDGVTDKPILDCCACGTAKYRLTFYGNWSEKTHPKDYPRRANHWSAIIGGSHSKNYVLWEYGGYASEGVKQVAELGSPVKMEEEIRQQSDEVLTVIKAKAQWPAWQPLNVRAAPSAEFSVDRTRHLMSFLTMMGPSPDWNVGLSAEDLCTKECGWVQKVVQDLIPWDAGTDSGVTYESPNKPTIPQEKIRPLTSLDHPQSPFYDPEGGSITQVARVVIERIARKGEQCNIVPDNVDDIVADLAPEEKDEDDTPETCIYSNWSPWSACSSSTCDKGKRMRQRMLKAQLDLSVPCPDTQDFQPCMGPGCSDEDGSTCTMSEWITWSPCSISCGMGMRSRERYVKQFPEDGSVCTLPTEETEKCTVNEECSPSSCLMTEWGEWDECSATCGMGMKKRHRMIKMNPADGSMCKAETSQAEKCMMPECHTIPCLLSPWSEWSDCSVTCGKGMRTRQRMLKSLAELGDCNEDLEQVEKCMLPECPIDCELTEWSQWSECNKSCGKGHVIRTRMIQMEPQFLQSLLES

SEQ ID NO: 311 - DNA, 3112 bp, Homo sapiens
cacgcgtccgcggacgcgtgggctgcagccggagaaagaggaagagggagagagagcgcgccagggcgagggcaccgccgccggtcgggcgcgctgggcctgcccggaatcccgccgcctgcgccccgcgccccgcgccctgcgggccatgggagccggccgccggcagggacgacgcctgtgagacccgcgagcggcctcggggaccatggggagcgatcgggcccgcaagggcggagggggcccgaaggacttcggcgcgggactcaagtacaactcccggcacgagaaagtgaatggcttggaggaaggcgtggagttcctgccagtcaacaacgtcaagaaggtggaaaagcatggcccggggcgctgggtggtgctggcagccgtgctgatcggcctcctcttggtcttgctggggatcggcttcctggtgtggcatttgcagtaccgggacgtgcgtgtccagaaggtcttcaatggctacatgaggatcacaaatgagaattttgtggatgcctacgagaactccaactccactgagtttgtaagcctggccagcaaggtgaaggacgcgctgaagctgctgtacagcggagtcccattcctgggcccctaccacaaggagtcggctgtgacggccttcagcgagggcagcgtcatcgcctactactggtctgagttcagcatcccgcagcacctggtggaggaggccgagcgcgtcatggccgaggagcgcgtagtcatgctgcccccgcgggcgcgctccctgaagtcctttgtggtcacctcagtggtggctttccccacggactccaaaacagtacagaggacccaggacaacagctgcagctttggcctgcacgcccgcggtgtggagctgatgcgcttcaccacgcccggcttccctgacagcccctaccccgctcatgcccgctgccagtgggccctgcggggggacgccgactcagtgctgagcctcaccttccgcagctttgaccttgcgtcctgcgacgagcgcggcagcgacctggtgacggtgtacaacaccctgagccccatggagccccacgccctggtgcagttgtgtggcacctaccctccctcctacaacctgaccttccactcctcccagaacgtcctgctcatcacactgataaccaacactgagcggcggcatcccggctttgaggccaccttcttccagctgcctaggatgagcagctgtggaggccgcttacgtaaagcccaggggacattcaacagcccctactacccaggccactacccacccaacattgactgcacatggaacattgaggtgcccaacaaccagcatgtgaaggtgcgcttcaaattcttctacctgctggagcccggcgtgcctgcgggcacctgccccaaggactacgtggagatcaatggggagaaatactgcggagagaggtcccagttcgtcgtcaccagcaacagcaacaagatcacagttcgcttccactcagatcagtcctacaccgacaccggcttcttagctgaatacctctcctacgactccagtgaccgttgcgacgccggccaccagttcacgtgcaagaacaagttctgcaagcccctcttctgggtctgcgacagtgtgaacgactgcggagacaacagcgacgagcaggggtgcatgaacgtcgtcacttgtaccaaacacacctaccgctgcctcaatgggctctgcttgagcaagggcaaccctgagtgtgacgggaaggaggactgtagcgacggctcagatgagaaggactgcgactgtgggctgcggtcattcacgagacaggctcgtgttgttgggggcacggatgcggatgagggcgagtggccctggcaggtaagcctgcatgctctgggccagggccacatctgcggtgcttccctcatctctcccaactggctggtctctgccgcacactgctacatcgatgacagaggattcaggtactcagaccccacgcagtggacggccttcctgggcttgcacgaccagagccagcgcagcgcccctggggtgcaggagcgcaggctcaagcgcatcatctcccaccccttcttcaatgacttcaccttcgactatgacatcgcgctgctggagctggagaaaccggcagagtacagctccatggtgcggcccatctgcctgccggacgcctcccatgtcttccctgccggcaaggccatctgggtcacgggctggggacacacccagtatggaggcactggcgcgctgatcctgcaaaagggtgagatccgcgtcatcaaccagaccacctgcgagaacctcctgccgcagcagatcacgccgcgcatgatgtgcgtgggcttcctcagcggcggcgtggactcctgccagggtgattccgggggacccctgtccagcgtggaggcggatgggcggatcttccaggccggtgtggtgagctggggagacggctgcgctcagaggaacaagccaggcgtgtacacaaggctccctctgtttcgggactggatcaaagagaacactggggtataggggccggggccacccaaatgtgtacacctgcggggccacccatcgtccaccccagtgtgcacgcctgcaggctggagactggaccgctgactgcaccagcgcccccagaacatacactgtgaactcaatctccagggctccaaatctgcctagaaaacctctcgcttcctcagcctccaaagtggagctgggaggtagaaggggaggacactggtggttctactgacccaactgggggcaaaggtttgaagacacagcctcccccgccagccccaagctgggccgaggcgcgtttgtgcatatctgcctcccctgtctctaaggagcagcgggaacggagcttcggggcctcctcagtgaaggtggtggggctgccggatctgggctgtggggcccttgggccacgctcttgaggaagcccaggctcggaggaccctggaaaacagacgggtctgagactgaaattgttttaccagctcccagggtggacttcagtgtgtgtatttgtgtaaatgagtaaaacattttatttctttttaaaaaaaaaaaaaaaaa

SEQ ID NO: 312 - protein, 782 aa, Homo sapiens
MGSDRARKGGGGPKDFGAGLKYNSRHEKVNGLEEGVEFLPVNNVKKVEKHGPGRWVVLAAVLIGLLLVLLGIGFLVWHLQYRDVRVQKVFNGYMRITNENFVDAYENSNSTEFVSLASKVKDALKLLYSGVPFLGPYHKESAVTAFSEGSVIAYYWSEFSIPQHLVEEAERVMAEERVVMLPPRARSLKSFVVTSVVAFPTDSKTVQRTQDNSCSFGLHARGVELMRFTTPGFPDSPYPAHARCQWALRGDADSVLSLTFRSFDLASCDERGSDLVTVYNTLSPMEPHALVQLCGTYPPSYNLTFHSSQNVLLITLITNTERRHPGFEATFFQLPRMSSCGGRLRKAQGTFNSPYYPGHYPPNIDCTWNIEVPNNQHVKVRFKFFYLLEPGVPAGTCPKDYVEINGEKYCGERSQFVVTSNSNKITVRFHSDQSYTDTGFLAEYLSYDSSDRCDAGHQFTCKNKFCKPLFWVCDSVNDCGDNSDEQGCMNVVTCTKHTYRCLNGLCLSKGNPECDGKEDCSDGSDEKDCDCGLRSFTRQARVVGGTDADEGEWPWQVSLHALGQGHICGASLISPNWLVSAAHCYIDDRGFRYSDPTQWTAFLGLHDQSQRSAPGVQERRLKRIISHPFFNDFTFDYDIALLELEKPAEYSSMVRPICLPDASHVFPAGKAIWVTGWGHTQYGGTGALILQKGEIRVINQTTCENLLPQQITPRMMCVGFLSGGVDSCQGDSGGPLSSVEADGRIFQAGVVSWGDGCAQRNKPGVYTRLPLFRDWIKENTGV

SEQ ID NO: 313 - DNA, 2805 bp, Homo sapiens
cgggtctgatagtccctacctgtcaggactggtgttaggatgagataatgtttgtgaactgtaaacatatataaacgtgtgctactgtgagaactggaacaaagaagagagggagtgagagaaatcaagggagggctggggctgggaaagaacgaaaagggagtcgcgtatagaggagaggcgacagtcgcgagccacactttgcaatgaaactctttagactttctgccgggagagcggcccagacgcgccaggtctgtagcaggaggccgcgagggcgggtccccagaagcctacaggtgagtatcggttctccccttcccggctttcggtccggaggaggcgggagcagcttccctgttctgatcctatcgcgggcggcgcagggccggcttggccttccgtgggacggggaggggggcgggatgtgtcacccaaataccagtggggacggtcggtggtggaaccagccgggcaggtcgggtagagtataagagccggagggagcggccggggcgcagacgcctgcagaccatcccagacgccggagcccgagccccgacgagtccccgcgcctcatccgcccgcgtccggtccgcgttcctccgccccaccatggctcggggccccggcctcgcgccgccaccgctgcggctgccgctgctgctgctggtgctggcggcggtgaccggccacacggccgcgcaggacaactgcacgtgtcccaccaacaagatgaccgtgtgcagccccgacggccccggcggccgctgccagtgccgcgcgctgggctcgggcatggcggtcgactgctccacgctgacctccaagtgtctgctgctcaaggcgcgcatgagcgcccccaagaacgcccgcacgctggtgcggccgagtgagcacgcgctcgtggacaacgatggcctctacgaccccgactgcgaccccgagggccgcttcaaggcgcgccagtgcaaccagacgtcggtgtgctggtgcgtgaactcggtgggcgtgcgccgcacggacaagggcgacctgagcctacgctgcgatgagctggtgcgcacccaccacatcctcattgacctgcgccaccgccccaccgccggcgccttcaaccactcagacctggacgccgagctgaggcggctcttccgcgagcgctatcggctgcaccccaagttcgtggcggccgtgcactacgagcagcccaccatccagatcgagctgcggcagaacacgtctcagaaggccgccggtgaagtggatatcggcgatgccgcctactacttcgagagggacatcaagggcgagtctctattccagggccgcggcggcctggacttgcgcgtgcgcggagaacccctgcaggtggagcgcacgctcatctattacctggacgagattcccccgaagttctccatgaagcgcctcaccgccggcctcatcgccgtcatcgtggtggtcgtggtggccctcgtcgccggcatggccgtcctggtgatcaccaaccggagaaagtcggggaagtacaagaaggtggagatcaaggaactgggggagttgagaaaggaaccgagcttgtaggtacccggcggggcaggggatggggtggggtaccggatttcggtatcgtcccagacccaagtgagtcacgcttcctgattcctcggcgcaaaggagacgtttatcctttcaaattcctgccttccccctcccttttgcgcacacaccaggtttaatagatcctggcctcagggtctcctttctttctcacttctgtcttgagggaagcatttctaaaatgtatcccctttcggtccaacaacaggaaacctgactggggcagtgaaggaagggatggcacagcgttatgtgtaaaaaacaagtatctgtatgacaacccgggatcgtttgcaagtaactgaatccattgcgacattgtgaaggcttaaatgagtttagatgggaaatagcgttgttatcgccttgggtttaaattatttgatgagttccacttgtatcatggcctacccgaggagaagaggagtttgttaactgggcctatgtagtagcctcatttaccatcgtttgtattactgaccacatatgcttgtcactgggaaagaagcctgtttcagctgcctgaacgcagtttggatgtctttgaggacagacattgcccggaaactcagtctatttattcttcagcttgcccttactgccactgatattggtaatgttcttttttgtaaaatgtttgtacatatgttgtctttgataatgttgctgtaattttttaaaataaaacacgaatttaataaaatatgggaaaggcacaaaccagaagtcggcatttgtgaaaagtccctccagatttctatcactttggtctctaatttcccaagacttgtattttttttttatttcaaattataacacttttttttcccccagaagtgggtgtttcatgttgctactctggtgtgtcccaagatatcctaactggccagtgtaaatgctattctttctaaataagattatttggaaacttccttcaaactgcaggagggcgagctctgagggcacgagaagctaaaactagctgcttttgatgaaaaagagtgccagtctttggtcatctctaaacaaggcttatcaccaatggagacagaaaactctagttcaagagctgtacctcctttgaatcccagccctactcgaaataagtggtactatttccatttagcctttgagcaaatcacttaactcaaaggcgttgtggctctaagattaaacgacttt

SEQ ID NO: 314 - protein, 323 aa, Homo sapiens
MARGPGLAPPPLRLPLLLLVLAAVTGHTAAQDNCTCPTNKMTVCSPDGPGGRCQCRALGSGMAVDCSTLTSKCLLLKARMSAPKNARTLVRPSEHALVDNDGLYDPDCDPEGRFKARQCNQTSVCWCVNSVGVRRTDKGDLSLRCDELVRTHHILIDLRHRPTAGAFNHSDLDAELRRLFRERYRLHPKFVAAVHYEQPTIQIELRQNTSQKAAGEVDIGDAAYYFERDIKGESLFQGRGGLDLRVRGEPLQVERTLIYYLDEIPPKFSMKRLTAGLIAVIVVVVVALVAGMAVLVITNRRKSGKYKKVEIKELGELRKEPSL

SEQ ID NO: 315 - DNA, 1142 bp, Homo sapiens
gccgccagcggctttctcggacgccttgcccagcgggccgcccgaccccctgcaccatggaccccgctcgccccctggggctgtcgattctgctgcttttcctgacggaggctgcactgggcgatgctgctcaggagccaacaggaaataacgcggagatctgtctcctgcccctagactacggaccctgccgggccctacttctccgttactactacgacaggtacacgcagagctgccgccagttcctgtacgggggctgcgagggcaacgccaacaatttctacacctgggaggcttgcgacgatgcttgctggaggatagaaaaagttcccaaagtttgccggctgcaagtgagtgtggacgaccagtgtgaggggtccacagaaaagtatttctttaatctaagttccatgacatgtgaaaaattcttttccggtgggtgtcaccggaaccggattgagaacaggtttccagatgaagctacttgtatgggcttctgcgcaccaaagaaaattccatcattttgctacagtccaaaagatgagggactgtgctctgccaatgtgactcgctattattttaatccaagatacagaacctgtgatgctttcacctatactggctgtggagggaatgacaataactttgttagcagggaggattgcaaacgtgcatgtgcaaaagctttgaaaaagaaaaagaagatgccaaagcttcgctttgccagtagaatccggaaaattcggaagaagcaattttaaacattcttaatatgtcatcttgtttgtctttatggcttatttgcctttatggttgtatctgaagaataatatgacagcatgaggaaacaaatcattggtgatttattcaccagtttttattaatacaagtcactttttcaaaaatttggatttttttatatataactagctgctattcaaatgtgagtctaccatttttaatttatggttcaactgtttgtgagacgaattcttgcaatgcataagatataaaagcaaatatgactcactcatttcttggggtcgtattcctgatttcagaagaggatcataactgaaacaacataagacaatataatcatgtgcttttaacatatttgagaataaaaaggactagcc

SEQ ID NO: 316 - protein, 235 aa, Homo sapiens
MDPARPLGLSILLLFLTEAALGDAAQEPTGNNAEICLLPLDYGPCRALLLRYYYDRYTQSCRQFLYGGCEGNANNFYTWEACDDACWRIEKVPKVCRLQVSVDDQCEGSTEKYFFNLSSMTCEKFFSGGCHRNRIENRFPDEATCMGFCAPKKIPSFCYSPKDEGLCSANVTRYYFNPRYRTCDAFTYTGCGGNDNNFVSREDCKRACAKALKKKKKMPKLRFASRIRKIRKKQF

SEQ ID NO: 317 - DNA, 2307 bp, Homo sapiens
  misc_feature (1)...(2307): n = A,T,C or G
agtcgaccccgcgtccggttttaatcaagctgcccaaagtcccccaatcactcctggaatacacagagagaggcagcagcttgctcagcggacaaggatgctgggcgtgagggaccaaggcctgccctgcactcgggcctcctccagccagtgctgaccagggacttctgacctgctggccagccaggacctgtgtggggaggccctcctgctgccttggggtgacaatctcagctccaggctacagggagaccgggaggatcacagagccagcatgttacaggatcctgacagtgatcaacctctgaacagcctcgatgtcaaacccctgcgcaaaccccgtatccccatggagaccttcagaaaggtggggatccccatcatcatagcactactgagcctggcgagtatcatcattgtggttgtcctcatcaaggtgattctggataaatactacttcctctgcgggcagcctctccacttcatcccgaggaagcagctgtgtgacggagagctggactgtcccttgggggaggacgaggagcactgtgtcaagagcttccccgaagggcctgcagtggcagtccgcctctccaaggaccgatccacactgcaggtgctggactcggccacagggaactggttctctgcctgtttcgacaacttcacagaagctctcgctgagacagcctgtaggcagatgggctacagcagcaaacccactttcagagctgtggagattggcccagaccaggatctggatgttgttgaaatcacagaaaacagccaggagcttcgcatgcggaactcaagtgggccctgtctctcaggctccctggtctccctgcactgtcttgcctgtgggaagagcctgaagaccccccgtgtggtgggtggggaggaggcctctgtggattcttggccttggcaggtcagcatccagtacgacaaacagcacgtctgtggagggagcatcctggacccccactgggtcctcacggcagcccactgcttcaggaaacataccgatgtgttcaactggaaggtgcgggcaggctcagacaaactgggcagcttcccatccctggctgtggccaagatcatcatcattgaattcaaccccatgtaccccaaagacaatgacatcgccctcatgaagctgcagttcccactcactttctcaggcacagtcaggcccatctgtctgcccttctttgatgaggagctcactccagccaccccactctggatcattggatggggctttacgaagcagaatggagggaagatgtctgacatactgctgcaggcgtcagtccaggtcattgacagcacacggtgcaatgcagacgatgcgtaccagggggaagtcaccgagaagatgatgtgtgcaggcatcccggaagggggtgtggacacctgccagggtgacagtggtgggcccctgatgtaccaatctgaccagtggcatgtggtgggcatcgttagctggggctatggctgcgggggcccgagcaccccaggagtatacaccaaggtctcagcctatctcaactggatctacaatgtctggaaggctgagctgtaatgctgctgcccctttgcagtgctgggagccgcttccttcctgccctgcccacctggggatcccccaaagtcagacacagagcaagagtccccttgggtacacnccctctngcccacnagnncctncagncantttncttnggagncagcaaangggcncntcaattncctgtaagagacccntcgncagcccagaggcgcccnagaggaagtcnagcagccctagctcggccnacacttggtgctcccangcatcccagggagagacnacnagccncactgaacaaggtctcaggggtattgctaagccaagaaggaacntttcccacactactgaatggaagcaggctgtcttgtaaaagcccagatcanctgtgggctggagaggagaaggaaagggtctgcgccangccctgtccgtcttncacccatccccaagcctactagagcnaagaaaccagttgtaatataaaatgcactgccctactgttggtatgactaccgttacctactgttgtcattgttattacagctatggccactattattaaagagnctgtgtaacatcaaaaaaaaaaaaaaaaaaaaaaaaaaraaaaaaaaataaataaaaaaaaactcgagggggggcccggtacccaattcgccctatagtgagtcgtattacaattcactggccgtcgttttacaacgtcgtgactgggaaaaccctggcgttac

SEQ ID NO: 318 - protein, 428 aa, Homo sapiens
MLQDPDSDQPLNSLDVKPLRKPRIPMETFRKVGIPIIIALLSLASIIIVVVLIKVILDKYYFLCGQPLHFIPRKQLCDGELDCPLGEDEEHCVKSFPEGPAVAVRLSKDRSTLQVLDSATGNWFSACFDNFTEALAETACRQMGYSSKPTFRAVEIGPDQDLDVVEITENSQELRMRNSSGPCLSGSLVSLHCLACGKSLKTPRVVGGEEASVDSWPWQVSIQYDKQHVCGGSILDPHWVLTAAHCFRKHTDVFNWKVRAGSDKLGSFPSLAVAKIIIIEFNPMYPKDNDIALMKLQFPLTFSGTVRPICLPFFDEELTPATPLWIIGWGFTKQNGGKMSDILLQASVQVIDSTRCNADDAYQGEVTEKMMCAGIPEGGVDTCQGDSGGPLMYQSDQWHVVGIVSWGYGCGGPSTPGVYTKVSAYLNW

SEQ ID NO: 319 - DNA, 3529 bp, Homo sapiens
atgattgaagacaataaggagaacaaagaccattccttagaaaggggaagagcaagtctcattttttccttaaagaatgaagttggaggacttataaaagccctgaaaatctttcaggagaagcatgtgaatctgttacatatcgagtcccgaaaatcaaaaagaagaaactcagaatttgagatttttgttgactgtgacatcaacagagaacaattgaatgatatttttcatctgctgaagtctcataccaatgttctctctgtgaatctaccagataattttactttgaaggaagatggtatggaaactgttccttggtttccaaagaagatttctgacctggaccattgtgccaacagagttctgatgtatggatctgaactagatgcagaccatcctggcttcaaagacaatgtctaccgtaaacgtcgaaagtattttgcggacttggctatgaactataaacatggagaccccattccaaaggttgaattcactgaagaggagattaagacctggggaaccgtattccaagagctcaacaaactctacccaacccatgcttgcagagagtatctcaaaaacttacctttgctttctaaatattgtggatatcgggaggataatatcccacaattggaagatgtctccaactttttaaaagagcgtacaggtttttccatccgtcctgtggctggttacttatcaccaagagatttcttatcaggtttagcctttcgagtttttcactgcactcaatatgtgagacacagttcagatcccttctataccccagagccagatacctgccatgaactcttaggtcatgtcccgcttttggctgaacctagttttgcccaattctcccaagaaattggcttggcttctcttggcgcttcagaggaggctgttcaaaaactggcaacgtgctactttttcactgtggagtttggtctatgtaaacaagatggacagctaagagtctttggtgctggcttactttcttctatcagtgaactcaaacatgcactttctggacatgccaaagtaaagccctttgatcccaagattacctgcaaacaggaatgtcttatcacaacttttcaagatgtctactttgtatctgaaagttttgaagatgcaaaggagaagatgagagaatttaccaaaacaattaagcgtccatttggagtgaagtataatccatatacacggagtattcagatcctgaaagacaccaagagcataaccagtgccatgaatgagctgcagcatgatctcgatgttgtcagtgatgcccttgctaaggtcagcaggaagccgagtatctaatcactaaatgaagatgttcttcaagtttctgtctttgcacttctactctttttgccatctcttcatggggaatgtcacccagatacatgacttcagttcttattttgaatgactcctctatttgcagttataaccctgacatctttcttgaatttttttgccccttaattccaacgaactcctggatgtctatgtagatgtctcataatttaggccaatgctgtacaacttcatgtggcatcatccacatagaatgaataggggttgttcaatatgacagccctgccaagcatctcaaattgaacaggtctataaaggaactcagaatcacttgaatatcacagtccatcagcttcctttcccagtaatttaatttccattaatggtatattaaacatcgtattttcaatcatttttaggtttagtcagctacttaaaaataggctttttcttcacataaataaattgtataccatttaatgtgttttatttcaacagactaatagatcttttaacacttcttagtcctcaaaataaattattaaaaactttgtatttcatgtcatattatataaggaaatagaattttgaagaataattcatgctgttttaaatttttacattgtacattttaatagctaatcaactcttaagtatacatttgatggtaaatagatgctagctaatctagaatcatttgaaatattgattatctgatttatagtttggttgcaaggaaatctactgtaagcaaatcataatagatagcaaatcttagaacatgtagaaaaaaagaaattaaaaaaagcaaatcttagaacatgtagaaaaaggaaattaaaaaatagatagcaaataacacaaattatgcatactatatatggttattttcatacaactttgataacggtgaagaatcatacttattgaattttaaaatgatgatgtttaaaatcactctatgactaaagcacatgagaataaatgttaaaggcacagccttataatccacaacttcagaacaatggaattttttttttttttttttttttttttttttttttttttttttgagacggagtcttgctctgtcgcccaggctggagtgcagtggtgcgatcttggctcactgcaagctccacctcccaggttcacggcattctcctgcctctgtctcctgagtagctgggactacaggcgcccgccaccacgtccggctcattttttgtatttttagtagagacaaggtttcaccgtgttagccaggatggtttcaatctcctgacattgtgatctgcccacctcggcctcccaaagtgctgggattacaggcgtgagccactgcacccggccaaacattggaaatttttaatgatggatttcagttcttctcacctctgggtatttgtaatatttggtaaatcaggagtcctgagagtcttagaattttcatgcattttaaatatatgtcttcaaagcacctaggaatatgtaaatagttacccaaatgtgagaacagaattgaactaaaagcttcgtttataatttttttttttttgagacagagtctcactctgttgcccaggctggagcgcagttgcgtgatttcagctcgctgcaacctgggactgcaggcgtgcttcaccatgccccgctaatttttgtttttttagtagagatggggtttcgccatgttggccaggctggtctcgaacttctgaccgcaggtgatccatccgcctcggcctcccaaagtgctgggattacaagcatgagccaccatgcccagccggttaataattcttaatcagtaaatcattattcaaagacatagttaatatcttcatgacttcttaaggatgctcaaaagctggtcttcagaatacctacatttctttatctacatattctgtcatttggagttatacaagtagtaatgacacaccaaaatgtaaataattattgttagcttttaagttggcttccaaattcaaaaaagaaaaaaatcctgaattctctaaaggaacatatgatagagtccatatgttaattcataggaagtgtttaaggtactatggtctattttggtctaatctttgttttactatgtaatatatatttatgatttacaagtttgttattcagtgggataataaatgaacacaaaatttaaaaaaaaaaaaaaaaataaaaa

SEQ ID NO: 320 - protein, 444 aa, Homo sapiens
MIEDNKENKDHSLERGRASLIFSLKNEVGGLIKALKIFQEKHVNLLHIESRKSKRRNSEFEIFVDCDINREQLNDIFHLLKSHTNVLSVNLPDNFTLKEDGMETVPWFPKKISDLDHCANRVLMYGSELDADHPGFKDNVYRKRRKYFADLAMNYKHGDPIPKVEFTEEEIKTWGTVFQELNKLYPTHACREYLKNLPLLSKYCGYREDNIPQLEDVSNFLKERTGFSIRPVAGYLSPRDFLSGLAFRVFHCTQYVRHSSDPFYTPEPDTCHELLGHVPLLAEPSFAQFSQEIGLASLGASEEAVQKLATCYFFTVEFGLCKQDGQLRVFGAGLLSSISELKHALSGHAKVKPFDPKITCKQECLITTFQDVYFVSESFEDAKEKMREFTKTIKRPFGVKYNPYTRSIQILKDTKSITSAMNELQHDLDVVSDALAKVSRKPSI

SEQ ID NO: 321 - DNA, 3505 bp, Homo sapiens
atgattgaagacaataaggagaacaaagaccattccttagaaaggggaagagcaagtctcattttttccttaaagaatgaagttggaggacttataaaagccctgaaaatctttcaggagaagcatgtgaatctgttacatatcgagtcccgaaaatcaaaaagaagaaactcagaatttgagatttttgttgactgtgacatcaacagagaacaattgaatgatatttttcatctgctgaagtctcataccaatgttctctctgtgaatctaccagataattttactttgaaggaagatggtatggaaactgttccttggtttccaaagaagatttctgacctggaccattgtgccaacagagttctgatgtatggatctgaactagatgcagaccatcctggcttcaaagacaatgtctaccgtaaacgtcgaaagtattttgcggacttggctatgaactataaacatggagaccccattccaaaggttgaattcactgaagaggagattaagacctggggaaccgtattccaagagctcaacaaactctacccaacccatgcttgcagagagtatctcaaaaacttacctttgctttctaaatattgtggatatcgggaggataatatcccacaattggaagatgtctccaactttttaaaagagcgtacaggtttttccatccgtcctgtggctggttacttatcaccaagagatttcttatcaggtttagcctttcgagtttttcactgcactcaatatgtgagacacagttcagatcccttctataccccagagccagatacctgccatgaactcttaggtcatgtcccgcttttggctgaacctagttttgcccaattctcccaagaaattggcttggcttctcttggcgcttcagaggaggctgttcaaaaactggcaacgtgctactttttcactgtggagtttggtctatgtaaacaagatggacagctaagagtctttggtgctggcttactttcttctatcagtgaactcaaacatgcactttctggacatgccaaagtaaagccctttgatcccaagattacctgcaaacaggaatgtcttatcacaacttttcaagatgtctactttgtatctgaaagttttgaagatgcaaaggagaagatgagagaatttaccaaaacaattaagcgtccatttggagtgaagtataatccatatacacggagtattcagatcctgaaagacaccaagagcataaccagtgccatgaatgagctgcagcatgatctcgatgttgtcagtgatgcccttgctaagtcactaaatgaagatgttcttcaagtttctgtctttgcacttctactctttttgccatctcttcatggggaatgtcacccagatacatgacttcagttcttattttgaatgactcctctatttgcagttataaccctgacatctttcttgaatttttttgccccttaattccaacgaactcctggatgtctatgtagatgtctcataatttaggccaatgctgtacaacttcatgtggcatcatccacatagaatgaataggggttgttcaatatgacagccctgccaagcatctcaaattgaacaggtctataaaggaactcagaatcacttgaatatcacagtccatcagcttcctttcccagtaatttaatttccattaatggtatattaaacatcgtattttcaatcatttttaggtttagtcagctacttaaaaataggctttttcttcacataaataaattgtataccatttaatgtgttttatttcaacagactaatagatcttttaacacttcttagtcctcaaaataaattattaaaaactttgtatttcatgtcatattatataaggaaatagaattttgaagaataattcatgctgttttaaatttttacattgtacattttaatagctaatcaactcttaagtatacatttgatggtaaatagatgctagctaatctagaatcatttgaaatattgattatctgatttatagtttggttgcaaggaaatctactgtaagcaaatcataatagatagcaaatcttagaacatgtagaaaaaaagaaattaaaaaaagcaaatcttagaacatgtagaaaaaggaaattaaaaaatagatagcaaataacacaaattatgcatactatatatggttattttcatacaactttgataacggtgaagaatcatacttattgaattttaaaatgatgatgtttaaaatcactctatgactaaagcacatgagaataaatgttaaaggcacagccttataatccacaacttcagaacaatggaattttttttttttttttttttttttttttttttttttttttttgagacggagtcttgctctgtcgcccaggctggagtgcagtggtgcgatcttggctcactgcaagctccacctcccaggttcacggcattctcctgcctctgtctcctgagtagctgggactacaggcgcccgccaccacgtccggctcattttttgtatttttagtagagacaaggtttcaccgtgttagccaggatggtttcaatctcctgacattgtgatctgcccacctcggcctcccaaagtgctgggattacaggcgtgagccactgcacccggccaaacattggaaatttttaatgatggatttcagttcttctcacctctgggtatttgtaatatttggtaaatcaggagtcctgagagtcttagaattttcatgcattttaaatatatgtcttcaaagcacctaggaatatgtaaatagttacccaaatgtgagaacagaattgaactaaaagcttcgtttataatttttttttttttgagacagagtctcactctgttgcccaggctggagcgcagttgcgtgatttcagctcgctgcaacctgggactgcaggcgtgcttcaccatgccccgctaatttttgtttttttagtagagatggggtttcgccatgttggccaggctggtctcgaacttctgaccgcaggtgatccatccgcctcggcctcccaaagtgctgggattacaagcatgagccaccatgcccagccggttaataattcttaatcagtaaatcattattcaaagacatagttaatatcttcatgacttcttaaggatgctcaaaagctggtcttcagaatacctacatttctttatctacatattctgtcatttggagttatacaagtagtaatgacacaccaaaatgtaaataattattgttagcttttaagttggcttccaaattcaaaaaagaaaaaaatcctgaattctctaaaggaacatatgatagagtccatatgttaattcataggaagtgtttaaggtactatggtctattttggtctaatctttgttttactatgtaatatatatttatgatttacaagtttgttattcagtgggataataaatgaacacaaaatttaaaaaaaaaaaaaaaaataaaaa

SEQ ID NO: 322 - protein, 466 aa, Homo sapiens
MIEDNKENKDHSLERGRASLIFSLKNEVGGLIKALKIFQEKHVNLLHIESRKSKRRNSEFEIFVDCDINREQLNDIFHLLKSHTNVLSVNLPDNFTLKEDGMETVPWFPKKISDLDHCANRVLMYGSELDADHPGFKDNVYRKRRKYFADLAMNYKHGDPIPKVEFTEEEIKTWGTVFQELNKLYPTHACREYLKNLPLLSKYCGYREDNIPQLEDVSNFLKERTGFSIRPVAGYLSPRDFLSGLAFRVFHCTQYVRHSSDPFYTPEPDTCHELLGHVPLLAEPSFAQFSQEIGLASLGASEEAVQKLATCYFFTVEFGLCKQDGQLRVFGAGLLSSISELKHALSGHAKVKPFDPKITCKQECLITTFQDVYFVSESFEDAKEKMREFTKTIKRPFGVKYNPYTRSIQILKDTKSITSAMNELQHDLDVVSDALAKSLNEDVLQVSVFALLLFLPSLHGECHPDT

SEQ ID NO: 323 - DNA, 1154 bp, Homo sapiens
cacgagggcgtccctctgcctgcccactcagtggcaacacccgggagctgttttgtcctttgtggagcctcagcagttccctctttcagaactcactgccaagagccctgaacaggagccaccatgcagtgcttcagcttcattaagaccatgatgatcctcttcaatttgctcatctttctgtgtggtgcagccctgttggcagtgggcatctgggtgtcaatcgatggggcatcctttctgaagatcttcgggccactgtcgtccagtgccatgcagtttgtcaacgtgggctacttcctcatcgcagccggcgttgtggtctttgctcttggtttcctgggctgctatggtgctaagactgagagcaagtgtgccctcgtgacgttcttcttcatcctcctcctcatcttcattgctgaggttgcagctgctgtggtcgccttggtgtacaccacaatggctgagcacttcctgacgttgctggtagtgcctgccatcaagaaagattatggttcccaggaagacttcactcaagtgtggaacaccaccatgaaagggctcaagtgctgtggcttcaccaactatacggattttgaggactcaccctacttcaaagagaacagtgcctttcccccattctgttgcaatgacaacgtcaccaacacagccaatgaaacctgcaccaagcaaaaggctcacgaccaaaaagtagagggttgcttcaatcagcttttgtatgacatccgaactaatgcagtcaccgtgggtggtgtggcagctggaattgggggcctcgagttcttttccaactcagctcgaaggccacctcttccagaaagcctctatagcactcccatcagaagagatcacgtctttctacaaccctcccctccatgactttcatggctcttagagcctctgctgtctctgcttcatcctggaagtatcacaatcctccaccacactgaacccctcaaggtagggccaggtctgattactttcaggtccccagtgcccagcacaaggctgaggccaaaaaaaggaccaggggatggttataaaataaatcaatgaattgactgcctaaaaaaaaaaaaaaaaaaaaaaaaaaaaaaaaaaaaaaaaaagaaaaaaaaaaaaaaaaaaaaagt

SEQ ID NO: 324 - protein, 258 aa, Homo sapiens
MQCFSFIKTMMILFNLLIFLCGAALLAVGIWVSIDGASFLKIFGPLSSSAMQFVNVGYFLIAAGVVVFALGFLGCYGAKTESKCALVTFFFILLLIFIAEVAAAVVALVYTTMAEHFLTLLVVPAIKKDYGSQEDFTQVWNTTMKGLKCCGFTNYTDFEDSPYFKENSAFPPFCCNDNVTNTANETCTKQKAHDQKVEGCFNQLLYDIRTNAVTVGGVAAGIGGLEFFSNSARRPPLPESLYSTPIRRDHVFLQPSPP

SEQ ID NO: 325 - DNA, 1076 bp, Homo sapiens
atgcagtgcttcagcttcattaagaccatgatgatcctcttcaatttgctcatctttctgtgtggtgcagccctgttggcagtgggcatctgggtgtcaatcgatggggcatcctttctgaagatcttcgggccactgtcgtccagtgccatgcagtttgtcaacgtgggctacttcctcatcgcagccggcgttgtggtctttgctcttggtttcctgggctgctatggtgctaagactgagagcaagtgtgccctcgtgacgttcttcttcatcctcctcctcatcttcattgctgaggttgcagctgctgtggtcgccttggtgtacaccacaatggctgagcacttcctgacgttgctggtagtgcctgccatcaagaaagattatggttcccaggaagacttcactcaagtgtggaacaccaccatgaaagggctcaagtgctgtggcttcaccaactatacggattttgaggactcaccctacttcaaagagaacagtgcctttcccccattctgttgcaatgacaacgtcaccaacacagccaatgaaacctgcaccgagcaaaaggctcacgaccaaaaagtagagggttgcttcaatcagcttttgtatgacatccgaactaatgcagtcaccgtgggtggtgtggcagctggaattgggggcctcgagctggctgccatgattgtgtccatgtatctgtactgcaatctacaataagtccacttctgcctctgccactactgctgccacatgggaactgtgaagaggcaccctggcaagcagcagtgattgggggaggggacaggatctaacaatgtcacttgggccagaatggacctgccctttctgctccagacttggggctagatagggaccactccttttaggcgatgctgactttccttccattggtgggtggatgggtggggggcattccagagcctctaaggtagccagttctgttgcccattcccccagtctattaaacccttgatatgccccctaggcctagtggtgatcccagtgctctactgggggatgagagaaaggcattttatagcctgggc

SEQ ID NO: 326 - protein, 241 aa, Homo sapiens
MQCFSFIKTMMILFNLLIFLCGAALLAVGIWVSIDGASFLKIFGPLSSSAMQFVNVGYFLIAAGVVVFALGFLGCYGAKTESKCALVTFFFILLLIFIAEVAAAVVALVYTTMAEHFLTLLVVPAIKKDYGSQEDFTQVWNTTMKGLKCCGFTNYTDFEDSPYFKENSAFPPFCCNDNVTNTANETCTEQKAHDQKVEGCFNQLLYDIRTNAVTVGGVAAGIGGLELAAMIVSMYLYCNLQ

SEQ ID NO: 327 - DNA, 2244 bp, Homo sapiens
gggaaggagatgcctcttccttcccttcaatagtgggttaaacccagctggcaccctctggaactacgggaacaatattcttcaagagaaggtcactctaccaaagccaggagcacagtattctcaggatctcaacaaggaagagcagaccaaggttgcttctgattccttacaaccttccgtaattccaggcttgtggccccaaattcagggccccacccttccaggaacaaatcattatagtaataatttgccttcatcttccatataccaactaagcatgtttaactacgaacgtccaaaacacttcatccagtcccaaaacccatgtggctccagattgcagcctcctggaccagaaacctccagcttctctagccagaccaaacagtcttccattatcatccagccccgccagtgtacagagcaaagattttctgcctcctcaacactgagctctcacatcaccatgtcctcctctgctttccctgcttctccccagcagcatgctggctccaacccaggccaaagggttacaaccacctataaccagtccccagccagcttcctcagctccatattaccatcacagcctgattacaatagcagtaaaatcccttccgctatggattccaactatcaacagtcctcagctggccaacctataaatgcaaagccatcccaaactgcaaatgctaagcccataccaagaactcctgatcatgaaatacaaggatcaaaagaagctttgattcaagatttggaaagaaagctgaaatgcaaggacacccttcttcataatggaaatcaacgtctaacatatgaagagaagatggctcgcagattgctaggaccacagaatgcagctgctgtgtttcaagctcaggatgacagtggtgcacaagactcgcagcaacacaactcagaacatgcgcgactgcaagttcctacatcacaagtaagaagtagatcaacctcaaggggagatgtgaatgatcaggatgcaatccaggagaaattttacccaccacgtttcattcaagtgccagagaacatgtcgattgatgaaggaagattctgcagaatggacttcaaagtgagtggactgccagctcctgatgtgtcatggtatctaaatggaagaacagttcaatcagatgatttgcacaaaatgatagtgtctgagaagggtcttcattcactcatctttgaagtagtcagagcttcagatgcaggggcttatgcatgtgttgccaagaatagagcaggagaagccaccttcactgtgcagctggatgtccttgcaaaagaacataaaagagcaccaatgtttatctacaaaccacagagcaaaaaagttttagagggagattcagtgaaactagaatgccagatctcggctatacctccaccaaagcttttctggaaaagaaataatgaaatggtacaattcaacactgaccgaataagcttatatcaagataacactggaagagttactttactgataaaagatgtaaacaagaaagatgctgggtggtatactgtgtcagcagttaatgaagctggagtgactacatgtaacacaagattagacgttacggcacgtccaaaccaaactcttccagctcctaagcagttacgggttcgaccaacattcagcaaatatttagcacttaatgggaaaggtttgaatgtaaaacaagcttttaacccagaaggagaatttcagcgtttggcagctcaatctggactctatgaaagtgaagaactttaataactttaccaacattggaaaacagccaactacaccattagtaatatatttgattacatttttttgaaattaatccatagctgtattaacagattatggttttaattaggtaatatagttaatatatatttataatattatttatcctttgactcttgcacattctatgtacccctccgatttgtgaagcctacaggaaatctgggtatatggatttgtaactgcagaagactatcttaaaatacaggattttaacatttaagtcatgcacatttaacaattacaggttataaattagtatcaactttttaaacacatctaatgcttgtaataacgtttactggtactgctttctaaatactgttttacccgttttctcttgtaggaatactaacatggtatagattatctgagtgttccacagttgtatgtcaaaagaaaataaaattcaaatatttaaaacggac

SEQ ID NO: 328 - protein, 498 aa, Homo sapiens
MFNYERPKHFIQSQNPCGSRLQPPGPETSSFSSQTKQSSIIIQPRQCTEQRFSASSTLSSHITMSSSAFPASPQQHAGSNPGQRVTTTYNQSPASFLSSILPSQPDYNSSKIPSAMDSNYQQSSAGQPINAKPSQTANAKPIPRTPDHEIQGSKEALIQDLERKLKCKDTLLHNGNQRLTYEEKMARRLLGPQNAAAVFQAQDDSGAQDSQQHNSEHARLQVPTSQVRSRSTSRGDVNDQDAIQEKFYPPRFIQVPENMSIDEGRFCRMDFKVSGLPAPDVSWYLNGRTVQSDDLHKMIVSEKGLHSLIFEVVRASDAGAYACVAKNRAGEATFTVQLDVLAKEHKRAPMFIYKPQSKKVLEGDSVKLECQISAIPPPKLFWKRNNEMVQFNTDRISLYQDNTGRVTLLIKDVNKKDAGWYTVSAVNEAGVTTCNTRLDVTARPNQTLPAPKQLRVRPTFSKYLALNGKGLNVKQAFNPEGEFQRLAAQSGLYESEEL

SEQ ID NO: 329 - DNA, 3649 bp, Homo sapiens
aatttctccgtaatttccactgcttgaaggctgctcgaggaacaggagcagcggcgaaacccaggtctgtcggtttacgagaatgcagtttccaagtacggctctcagttccaaggcaattcccagcacgacgccctggaattcctgctctggttgctggatcgtgtacatgaggacctggagggttcatcccgagggccggtgtcggagaagcttccgcctgaagccactaaaacctctgagaactgcctgtcaccatcagctcagcttcctctaggtcaaagctttgtgcaaagccactttcaagcacaatatagatcttccttgacttgtccccactgcctgaaacagagcaacacctttgatcctttcctgtgtgtgtccctacctatccccttgcgccagacgaggttcttgagtgtcaccttggtcttcccctctaagagccagcggttcctgcgggttggcctggccgtgccgatcctcagcacagtggcagccctgaggaagatggttgcagaggaaggaggcgtccctgcagatgaggtgatcttggttgaactgtatcccagtggattccagcggtctttctttgatgaagaggacctgaataccatcgcagagggagataatgtgtatgcctttcaagttcctccctcacccagccaggggactctctcagctcatccactgggtctgtcggcctccccacgcctggcagcccgtgagggccagcgattctccctctctctccacagtgagagcaaggtgctaatcctcttctgtaacttggtggggtcagggcagcaggctagcaggtttgggccacccttcctgataagggaagacagagctgtttcctgggcccagctccagcagtctatcctcagcaaggtccgccatcttatgaagagtgaggcccctgtacagaacctggggtctctgttctccatccgtgttgtgggactctctgtggcctgcagctatctgtctccgaaggacagtcggcccctctgtcactgggcagttgacagggttttgcatctcaggaggccaggaggccctccacatgtcaagctggcggtggagtgggatagctctgtcaaggagcgcctgttcgggagcctccaggaggagcgagcgcaggatgccgacagtgtgtggcagcagcagcaggcgcatcagcagcacagctgtaccttggatgaatgttttcagttctacaccaaggaggagcagctggcccaggatgacgcctggaagtgtcctcactgccaagtcctgcagcaggggatggtgaagctgagtttgtggacgctgcctgacatcctcatcatccacctcaaaaggttctgccaggtgggcgagagaagaaacaagctctccacgctggtgaagtttccgctctctggactcaacatggctccccatgtggcccagagaagcaccagccctgaggcaggactgggcccctggccttcctggaagcagccggactgcctgcccaccagttacccgctggacttcctgtacgacctgtatgccgtctgcaaccaccatggcaacctgcaaggtgggcattacacagcctactgccggaactctctggatggccagtggtacagttatgatgacagcacggtggaaccgcttcgagaagatgaggtcaacaccagaggggcttatatcctgttctatcagaagcggaacagcatccctccctggtcagccagcagctccatgagaggctctaccagctcctccctgtctgatcactggctcttacggctcgggagccacgctggcagcacaaggggaagcctgctgtcctggagctctgccccctgcccctccctgccccaggttcctgactctcccatcttcaccaacagcctctgcaatcaggaaaagggagggttggagcccaggcgtttggtacggggcgtgaaaggcagaagcattagcatgaaggcacccaccacttcccgagccaagcagggaccattcaagaccatgcctctgcggtggtcctttggatccaaggagaaaccaccaggtgcctccgtcgagttggtggagtacttggaatccagacgaagacctcggtccacgagccagtccattgtgtcgctgttgacgggcactgcgggtgaggatgagaagtcagcatcgccgaggtccaacgtcgcccttcctgctaacagcgaagatggtgggcgggccattgaaagaggtccagccggggtgccctgtccctcggctcaacccaaccactgtctggcccctggaaactcagatggtccaaacacagcaaggaaactcaaggaaaatgcagggcaggacatcaagcttcccagaaagtttgacctgcctctcactgtgatgccttcagtggagcatgagaaaccagctcgaccggagggccagaaggccatgaactggaaggagagcttccagatgggaagcaaaagcagcccaccctccccctatatgggattctctggaaacagcaaagacagtcgccgaggcacctctgagctagacagacccctgcaggggacactcacccttctgaggtccgtgtttcggaagaaggagaacaggaggaatgagagggcagaggtctctccacaggtgccccccgtctccctggtgagtggcgggctgagccctgccatggacgggcaggctccaggctcacctcctgccctcaggatcccagagggcctggccaggggcctgggcagccggctcgagagggatgtctggtcagcccccagctctctccgcctccctcgtaaagccagcagggccccgagaggcagtgcactgggcatgtcacaaaggactgttccaggggagcaggcttcttatggcacctttcagagagtcaaatatcacactctttctttaggtcgaaagaaaaccttaccggagtccagcttttgatggagcgtgtcagtattgtgtgacgctggcattcttgggactttgccaagcaactgtaggcagctcatgttgagaatgggtttccaggaaacccgttgtcttgtaatctctaaaaaaaaatttttttttttttgtggtggggggtctccatatctagacttccaacacccaaggtccatataacccaaggtcgaaaaccttcctgcatcattgggtgctttgctacagtttggccactagaggatgctattgggtcagtattaccagtttcagggcaagaactgatatttactaaagagttttggatgtgggcaaacaagatgaggctggtttaataagaatcttcaatgtcgtgtcaaatactgtcaatggcttttcctttttctttcttttttttttaaattgtggacttaaagaaaaatattttatttttaatgcttttctgggataagcattaaagatgccaaaaagaaaaaaaaacaaaagaatgatagtgatggtaaggcaagattctagcaaagagagatgggagataaatggctgagagttcaggtgaatatttaatatattaaaaattgtattaaagtttttcaaggtattttaaaaataactattttgatactagaaaaaaagtccattttttaatttaaatatgagatctatgtacaattttaataaaatcctgtccatgaaacacgca

SEQ ID NO: 330 - protein, 812 aa, Homo sapiens
MVAEEGGVPADEVILVELYPSGFQRSFFDEEDLNTIAEGDNVYAFQVPPSPSQGTLSAHPLGLSASPRLAAREGQRFSLSLHSESKVLILFCNLVGSGQQASRFGPPFLIREDRAVSWAQLQQSILSKVRHLMKSEAPVQNLGSLFSIRVVGLSVACSYLSPKDSRPLCHWAVDRVLHLRRPGGPPHVKLAVEWDSSVKERLFGSLQEERAQDADSVWQQQQAHQQHSCTLDECFQFYTKEEQLAQDDAWKCPHCQVLQQGMVKLSLWTLPDILIIHLKRFCQVGERRNKLSTLVKFPLSGLNMAPHVAQRSTSPEAGLGPWPSWKQPDCLPTSYPLDFLYDLYAVCNHHGNLQGGHYTAYCRNSLDGQWYSYDDSTVEPLREDEVNTRGAYILFYQKRNSIPPWSASSSMRGSTSSSLSDHWLLRLGSHAGSTRGSLLSWSSAPCPSLPQVPDSPIFTNSLCNQEKGGLEPRRLVRGVKGRSISMKAPTTSRAKQGPFKTMPLRWSFGSKEKPPGASVELVEYLESRRRPRSTSQSIVSLLTGTAGEDEKSASPRSNVALPANSEDGGRAIERGPAGVPCPSAQPNHCLAPGNSDGPNTARKLKENAGQDIKLPRKFDLPLTVMPSVEHEKPARPEGQKAMNWKESFQMGSKSSPPSPYMGFSGNSKDSRRGTSELDRPLQGTLTLLRSVFRKKENRRNERAEVSPQVPPVSLVSGGLSPAMDGQAPGSPPALRIPEGLARGLGSRLERDVWSAPSSLRLPRKASRAPRGSALGMSQRTVPGEQASYGTFQRVKYHTLSLGRKKTLPESSF

SEQ ID NO: 331 - DNA, 1811 bp, Homo sapiens; identical to SEQ ID NO: 106

SEQ ID NO: 332 - protein, 282 aa, Homo sapiens; identical to SEQ ID NO: 107

SEQ ID NO: 333 - DNA, 1984 bp, Homo sapiens
gaagaattagcagcaaaagtggttcagatgttttatgtggctgagccaaagcaagtgccccatattctctgtagtccttctatgaagaatattaatcctttaactgccatgagctatctaaggaagctggatacttctgggttttcatcgatcttagtgacattgaccaaggcagcagtggctctgaaaatgggagatcttgacatgcacagaaatgaaatgaaaagccattcagagatgaagttggtatgtggcttcattctggaacctcggctgttgattcaacagagaaagggacagattgttccaaccgagcttgcacttcacttgaaggaaactcagcctggattgcttgtggcttcagttctgggcttgcagaagaacaacaaaattggaattgaagaagcagattccttttttaaggtgctttgtgctaaggatgaagatacaattcctcagctcttggtagacttttgggaagctcagctagtggcatgtctcccagatgtggtacttcaggaactctttttcaaactcacatcacagtacatctggagattgtctaagaggcagcctcctgacaccacaccattgcgaacatcggaggatctgataaatgcctgtagtcattatggcttaatttatccatgggttcatgtcgtaatatcatctgattctttagctgataaaaattatacagaagatctttcaaaattacagcttccattattccgttcttggagccactttcagaagacactattgccggcctcagtgtccatgttctgtgtcgtacacgcttgaaagagtatgaacagtgcatagacatactgttagagagatgcccggaggcagtcattccatatgctaatcatgaactgaaagaagagaaccggatagactctgtggtggaaaaaactgttgcctgaactttgtcagagaataaaatgtggtggagagaagtatcaactctacctgtcatcattaaaagcttaattttcacgggaactgtggaagctagcagacagtaccactacattataaatgaggaacctaggacttggaagattaagtgactttcttaaagccactcgaaacattgtcaattgttgctgtggaactagaactgaaggatttcatgaatgttctcccagaagatggtactgcaacatttttcttgccatatcttctctattgcagtcgaaagaaaccattgacttaaaggtatcatttgaaaaataccataatggcatttgagactgaatttctaaaaattgaatgccaaagtacaagtagaggagttttttattttatatatcacacacacacacacacacacacacacacacacacacacacatatatgatacaaatgctttcaggctgcttaccttaccgtgtagtggtaactattcacttcttaatttatgacctcaatcaatttaattgtctagaatgtaaaaagtctttaagacataagaattcctcaaagaagccatacattttttaaggtggggattgacttttattccaaggaacaacatcagttcactgttgttggagacatgacaatcattttcatcccaagaacactttaaggaaacattttacaagtatgcttgaaagaatgtcactaactggtccagaattttatcttcttgatttttccagatttctctatgtttttgagaaagatgttaatgttttgccatggtaaaagatttcaaacctcattttttttgttccttttcttgttacttttaagaaaactcatgctctgtttctctgaatcaaatgaagtagaagtttacaaagctaactttcttcttgtctagctattaacatgatttgtcaaatgcatgtttttttcagccaaagccttgtttccatttttgttgatgtgtactcttgctcttttagctagagtgtatgtgaaaataaagaaatacatcattgtattcacaaaaaaaaaaaaaaaaaaaaa

SEQ ID NO: 334 - protein, 258 aa, Homo sapiens
MFYVAEPKQVPHILCSPSMKNINPLTAMSYLRKLDTSGFSSILVTLTKAAVALKMGDLDMHRNEMKSHSEMKLVCGFILEPRLLIQQRKGQIVPTELALHLKETQPGLLVASVLGLQKNNKIGIEEADSFFKVLCAKDEDTIPQLLVDFWEAQLVACLPDVVLQELFFKLTSQYIWRLSKRQPPDTTPLRTSEDLINACSHYGLIYPWVHVVISSDSLADKNYTEDLSKLQLPLFRSWSHFQKTLLPASVSMFCVVHA

SEQ ID NO: 335 - DNA, 2180 bp, Homo sapiens
  misc_feature (1)...(2180): n = A,T,C or G
acgcctccgctcgcagcggcggccaacatcaccgccactgccacccctcccagactgtggacgggaggatggagtcgatggccgtcgctaccgacggcggggagaggccgggggtcccagcgggctcaggtctgtcggcttcccagcgtcgggcggagctgcgtcggagaaagctgctcatgaactcggaacagcgcatcaaccggatcatgggctttcacaggcccgggagcggcgcggaagaagaaagtcaaacaaaatcaaagcagcaggacagtgataaactgaactccctcagcgttccttccgtttcaaagcgagtagtgctgggtgattcagtcagtacaggaacaactgaccagcagggtggtgtggccgaggtaaaggggacccaactgggagacaaattggactcgttcattaaaccacctgagtgcagtagtgatgtcaaccttgagctccggcagcggaacagaggggacctgacagcggactcggtccagaggggttcccgccatggcctagagcagtacctttccagattcgaagaagcaatgaagctaaggaaacagctgattagtgaaaaacccagtcaagaggatggaaatacaacagaagaatttgactcttttcgaatatttagattggtgggatgtgctcttcttgctcttggagtcagagcttttgtttgcaaatacttgtccatatttgctccatttcttactttacaacttgcgttacatgggattatacaaatattttcccaagagtgaaaagaagataaagacaacagtactaacagctgcacttctattgtcgggaattcctgccgaagtgataaatcgatcaatggatacctatagcaaaatgggcgaagtcttcacagatctctgtgtctactttttcacttttatcttttgtcatgaactgcttgattattggggctctgaagtaccatgaagcctgtagaactgagaaggagaagcttacaaaaaaaaaaaaatcctcttctatattgcagtgtctctaaaggaggcaaattggtttacaccttcatgtaattcttttactttaggggttgtaaagctactttattagatatagaatggcagattctctgatttaaaagggctgagtttgtattattactgatatgaagaatagagtaccaatgtcattaattgatttttcttgttaatcagaattcctattctgtacctttcctctaacttctcagatttgtaattcttcttttgggagctgagctagtgcttttaggagaacagataaatgtggtctcagccagccctagagactgcttcttgtgtttgtgtcattctgtcctgagaaantgaagtcatctgaaaaataaaatgacagaaactgaattgtctaatgttaactctgcacattgtaacttttcttgttgagttagtatcttaatttttactccagcacaagtatttaatcaaagaaaagattcatacatgtgaaattggaaggtatttataaaatttttattgctgtataccaaactcagaattggaactttttacatttgagtttcactttttagaagtatgttttaagcaagcaaaaacaaaatgggatgagaagaattgaggcatgcaacccaatagcataaatgtcctttttccccccaaatatggtctagatgagttattataaacattgtttttatttttttgagacagagtttcgctcttgttgcccaggctagagtgcaatggcgccatctcggctcaccgcaacctccaccttcctggttcaagggatctcctgcctcagcctcccaagtagctgggattacaggcatgcaccaccacgcccagctaatttttatattctttagtaaagacagggtttctccatgttggtcaggctggtctcgaacttctgacctcaggtgatctgcccacctcggcctcccaaagtgctggattacaggcgtgagcactgcacctggccttataaatatccttttaactaactcagtaactgccatattttgttgggttgtcttcttaaaagaatataagactaaagtgttaatgtcacttggtgttacatttccttacagatttttgtatagtctaatttggttaatccttgtgacattaaaaacacatacactttttaaaaaaaaaaaaaaactttag

SEQ ID NO: 336 - protein, 234 aa, Homo sapiens
MESMAVATDGGERPGVPAGSGLSASQRRAELRRRKLLMNSEQRINRIMGFHRPGSGAEEESQTKSKQQDSDKLNSLSVPSVSKRVVLGDSVSTGTTDQQGGVAEVKGTQLGDKLDSFIKPPECSSDVNLELRQRNRGDLTADSVQRGSRHGLEQYLSRFEEAMKLRKQLISEKPSQEDGNTTEEFDSFRIFRLVGCALLALGVRAFVCKYLSIFAPFLTLQLALHGIIQIFSQE

SEQ ID NO: 337 - DNA, 3695 bp, Homo sapiens
tatagggagtcgaccacgcgtccgcgcgtcgcaggggtcgctggagaggaggcgctccgcccgcccgccgcgtcctccgctgcttctccgcgcccggctggagcccggcgcccggtcgccccgtcgcgctcgaccccgagggcatgcggcagccgcaggggcccccgctcccgggctcggcggcgcgggtgaacgtgagcggatgttcacttcttctccacaatgaatgagtgtcactatgacaagcacatggactttttttataataggagcaacactgatactgtcgatgactggacaggaacaaagcttgtgattgttttgtgtgttgggacgtttttctgcctgtttatttttttttctaattctctggtcatcgcggcagtgatcaaaaacagaaaatttcatttccccttctactacctgttggctaatttagctgctgccgatttcttcgctggaattgcctatgtattcctgatgtttaacacaggcccagtttcaaaaactttgactgtcaaccgctggtttctccgtcaggggcttctggacagtagcttgactgcttccctcaccaacttgctggttatcgccgtggagaggcacatgtcaatcatgaggatgcgggtccatagcaacctgaccaaaaagagggtgacactgctcattttgcttgtctgggccatcgccatttttatgggggcggtccccacactgggctggaattgcctctgcaacatctctgcctgctcttccctggcccccatttacagcaggagttaccttgttttctggacagtgtccaacctcatggccttcctcatcatggttgtggtgtacctgcggatctacgtgtacgtcaagaggaaaaccaacgtcttgtctccgcatacaagtgggtccatcagccgccggaggacacccatgaagctaatgaagacggtgatgactgtcttaggggcgtttgtggtatgctggaccccgggcctggtggttctgctcctcgacggcctgaactgcaggcagtgtggcgtgcagcatgtgaaaaggtggttcctgctgctggcgctgctcaactccgtcgtgaaccccatcatctactcctacaaggacgaggacatgtatggcaccatgaagaagatgatctgctgcttctctcaggagaacccagagaggcgtccctctcgcatcccctccacagtcctcagcaggagtgacacaggcagccagtacatagaggatagtattagccaaggtgcagtctgcaataaaagcacttcctaaactctggatgcctctcggcccacccaggcctcctctgggaaaagagctgttaagaatgattacctgtctctaacaaagcccatgtacagtgttatttgaggtctccattaatcactgctagatttctttaaaaaattttttttcatagtttaaaagcatgggcagtaaagagaggacctgctgcatttagagaaagcacagaaacgggagaggttcggcgggtccctgcttgtcctatgaactgctcagagctcctgtcagtccagctgggccttctgggttctggcaccatttcgtagccattctctttgtattttaaaaggacgttatgaaagggcttagaccaaaataaatcataatgttacttgagccaccttatatagctgcttggagagtctatgtagttctttctgcatgcattaaaaatgtttagaaatgcttcagcaatggtatttttttcctcaaagaaaccatggccagtagctaggtgttcagtaggaatcaaagaaaaatcagtaagagctccagattaaacctgatttttaactgaaggaacattctgaggaaaaatacttaaaagtaaaaaaggtcaatgtgaaaaccctttttgacctgaaaaaggccttagtatggtcctccatgcatgtgtgtgtatatgcatgtgtgtgtgtgtgtgtgtgtgtgtctatatatatatatatatatatatatatatatattcctgtttttactgatttttattgattttgttcaaagatatctggggattggattggggaatgcttaatctgactattgaaagaaacatggatccctggagtatttcagatacggggttaccgccccagactgcctcccgccagtccacattagttctcattttccctcatgatggtgaaaaacagtggagagctagtaaagggtttatgcagaaaacaaggagaagagaatgtgaagtttgaagtgcctatggaacatccagctgataatcttgcctagtaagagcaaaagaagccaagagaacaccaacgtttaaggagcaggtagagaaaacccagcaaaaggacagaggaataagaggaccaaagaacaatgttaagaatcaaggagagaggtcaggcacgctggctcatgcctgtaatcccagcactttgggaggctgaggcaggtggatcacttgaggccaggagtatgagaccagcctgggcaatgtggtgaaattgcatctttactaaaaatacaaaaactagccaggcatggtggcacatgcctgtaataccaggtacttgggaagctgaggcataagaatcacttgaacccgggaggtggaggttgcagagtgagccaagatcgcagcactgcactctagtctgggtgacagagcaagactctgtctcaaaaaaaaaaaaaaaaaaaaaaaaagactagagaatgtcagggaacacatgtgtatatttaaacaacttcactttgcatttaaaaactcgaaggacagcgaaggtgaaatcaattcacgggccacctagactttccagcctaggactagagctgtagcaatgatctgttgtgctgtacaagaaaagagaaagaggtgttcatttgagaacagatgtttttatacatcagagtaaaagctgtattgaagagcaggctgaatcccttccatatagaatgaaatatgagcttgaccccagtccttatcttcagttacctccataccaactggtggcatgttggatttagcatgtagaataatttcccatctcttatttttcccaaggttaatggcatccttctggtacctggcttacatgtgaactgaattttgatctgggttctattttgaatttttctccttcagagacctaagtaggcaacatgaaagacaagtagttaagaaagaaaaaatgatgtttcatacacacaggctaccaacgagagttttctatgtaaaacatttagagtgtattctgatttaaaatgagaataacttcaaggtagatattatagtatttatgtagtttgcaaaagaagtttacatttttttgctattgtgatataacatttatgtgcaagaactacttgtaataaaaggatttgagatgtcatgcttctaaatataatagcctaaaatagagaatattatgatttgaaagtgtagatttcacaaactctgtatagtatgtgggtctatctgaagcttttatcgaagctacctataaaataaaattttaaaagatctgttctctcttgttgaggtgcattattgctttgtgtattttctaagtaaaaatatagtttgtggtaactacagcataaatttctattgcagaagaaaaatcaaatttgccatgaagtacatactctcaatgttttatgtaagcattttgaatctatagctggccaaaggg

SEQ ID NO: 338 - protein, 353 aa, Homo sapiens
MNECHYDKHMDFFYNRSNTDTVDDWTGTKLVIVLCVGTFFCLFIFFSNSLVIAAVIKNRKFHFPFYYLLANLAAADFFAGIAYVFLMFNTGPVSKTLTVNRWFLRQGLLDSSLTASLTNLLVIAVERHMSIMRMRVHSNLTKKRVTLLILLVWAIAIFMGAVPTLGWNCLCNISACSSLAPIYSRSYLVFWTVSNLMAFLIMVVVYLRIYVYVKRKTNVLSPHTSGSISRRRTPMKLMKTVMTVLGAFVVCWTPGLVVLLLDGLNCRQCGVQHVKRWFLLLALLNSVVNPIIYSYKDEDMYGTMKKMICCFSQENPERRPSRIPSTVLSRSDTGSQYIEDSISQGAVCNKSTS

SEQ ID NO: 339 - DNA, 3320 bp, Homo sapiens
gcgagagccgcgggggccgcggagctggagccggagctgaagccggagccgggttggagtctgggcgggggccgggccggagcgggctccagagacatggggtcgaccgactccaagctgaacttccggaaggcggtgatccagctcaccaccaagacgcagcccgtggaagccaccgatgatgccttttgggaccagttctgggcagacacagccacctcggtgcaggatgtgtttgcactggtgccggcagcagagatccgggccgtgcgggaagagtcaccctccaacttggccaccctgtgctacaaggccgttgagaagctggtgcagggagctgagagtggctgccactcggagaaggagaagcagatcgtcctgaactgcagccggctgctcacccgcgtgctgccctacatctttgaggaccccgactggaggggcttcttctggtccacagtgcccggggcagggcgaggagggcagggagaagaggatgatgagcatgccaggcccctggccgagtccctgctcctggccattgctgacctgctcttctgcccggacttcacggttcagagccaccggaggagcactgtggactcggcagaggacgtccactccctggacagctgtgaatacatctgggaggctggtgtgggcttcgctcactccccccagcctaactacatccacgatatgaaccggatggagctgctgaaactgctgctgacatgcttctccgaggccatgtacctgcccccagctccggaaagtggcagcaccaacccatgggttcagttcttttgttccacggagaacagacatgccctgcccctcttcacctccctcctcaacaccgtgtgtgcctatgaccctgtgggctacgggatcccctacaaccacctgctcttctctgactaccgggaacccctggtggaggaggctgcccaggtgctcattgtcactttggaccacgacagtgccagcagtgccagccccactgtggacggcaccaccactggcaccgccatggatgatgctgatcctccaggccctgagaacctgtttgtgaactacctgtcccgcatccatcgtgaggaggacttccagttcatcctcaagggtatagcccggctgctgtccaaccccctgctccagacctacctgcctaactccaccaagaagatccagttccaccaggagctgctagttctcttctggaagctctgcgacttcaacaagaaattcctcttcttcgtgctgaagagcagcgacgtcctagacatccttgtccccatcctcttcttcctcaacgatgcccgggccgatcagtctcgggtgggcctgatgcacattggtgtcttcatcttgctgcttctgagcggggagcggaacttcggggtgcggctgaacaaaccctactcaatccgcgtgcccatggacatcccagtcttcacagggacccacgccgacctgctcattgtggtgttccacaagatcatcaccagcgggcaccagcggttgcagcccctcttcgactgcctgctcaccatcgtggtcaacgtgtccccctacctcaagagcctgtccatggtgacygccaacaagttgctgcacctgctggaggccttctccaccacctggttcctcttctctgcygcccagaaccaccacctggtcttcttcctcctggaggtcttcaacaacatcatccagtaccagtttgatggcaactccaacctggtctacgccatcatccgcaagcgcagcatcttccaccagctggccaacctgcccacggacccgcccaccattcacaaggccctgcagcggcgccggcggacacctgagcccttgtctcgcaccggctcccaggagggcacctccatggagggctcccgccccgctgcccctgcagagccaggcaccctcaagaccagtctggtggctactccaggcattgacaagctgaccgagaagtcccaggtgtcagaggatggcaccttgcggtccctggaacctgagccccagcagagcttggaggatggcagcccggctaagggggagcccagccaggcatggagggagcagcggcgaccgtccacctcatcagccagtgggcagtggagcccaacgccagagtgggtcctctcctggaagtcgaagctgccgctgcagaccatcatgaggctgctgcaggtgctggttccgcaggtggagaagatctgcatcgacaagggcctgacggatgagtctgagatcctgcggttcctgcagcatggcaccctggtggggctgctgcccgtgccccaccccatcctcatccgcaagtaccaggccaactcgggcactgccatgtggttccgcacctacatgtggggcgtcatctatctgaggaatgtggacccccctgtctggtacgacaccgacgtgaagctgtttgagatacagcgggtgtgaggatgaagccgacgaggggctcagtctaggggaaggcagggccttggtccctgaggcttcccccatccaccattctgagctttaaattaccacgatcagggcctggaacaggccagagtggccctggagtgtcatgccctagagacccctgtggccaggacaatgtgaactggctcagatccccctcaacccctaggctggactcacaggagccccatctctggggctatgcccccaccagagaccactgcccccaacactcggactccctctttaagacctggctcagtgctggcccctcagtgcccacccactcctgtgctacccagccccagaggcagaagccaaaatgggtcactgtgccctaaggggtttgaccagggaaccacgggctgtcccttgaggtgcctggacagggtaagggggtgcttccagcctcctaacccaaagccagctgttccaggctccaggggaaaaaggtgtggccaggctgctcctcgaggaggctgggagctggccgactgcaaaagccagactggggcacctcccgtatccttggggcatggtgtggggtggtgagggtctcctgctatattctcctggatccgtggaaatagcctggctccctcttacccagtaatgaggggcagggaagggaactgggaggcagccgtttagtcctccctgccctgcccactgcctggatggggcgatgccacccctcatccttcacccaagctctggcctctgggtcccaccacccagccccccgtgtcagaacaatctttgctctgtacaatcggcctctttacaataaaacctcctgctccccaaaaaaaaaaaaaaaaaaaaaaaaa

SEQ ID NO: 340 - protein, 784 aa, Homo sapiens
MGSTDSKLNFRKAVIQLTTKTQPVEATDDAFWDQFWADTATSVQDVFALVPAAEIRAVREESPSNLATLCYKAVEKLVQGAESGCHSEKEKQIVLNCSRLLTRVLPYIFEDPDWRGFFWSTVPGAGRGGQGEEDDEHARPLAESLLLAIADLLFCPDTQSHRRSTVDSAEDVHSLDSCEYIWEAGVGFAHSPQPNYIHDMNRMELLKLLLTCFSEAMYLPPAPESGSTNPWVQFFCSTENRHALPLFTSLLNTVCAYDPVGYGIPYNHLLFSDYREPLVEAQVLIVTLDHDSASSASPTVDGTTTGTAMDDADPPGPENLFVNYLSRIHREEDFQFILKGIARLLSNPLLQTYLPNSTKKIQFHQELLVLFWKLCDFNKKFLFFVLKSSDVLDILVPILFFLNDARADQSRVGLMHIGVFILLLLSGERNFGVRLNKPYSIRVPMDIPVFTGTHADLLIVVFHKIITSGHQRLQPLFDCLLTIVVNVSPYLKSLSMVTANKLLHLLEAFSTTWFLFSAAQNHHLVFFLLEVFNNIIQYQFDGNSNLVYAIIRKRSIFHQLANLPTDPPTIHKALQRRRRTPEPLSRTGSQEGTSMEGSRPAAPAEPGTLKTSLVATPGIDKLTEKSQVSEDGTLRSLEPEPQQSLEDGSPAKGEPSQAWREQRRPSTSSASGQWSPTPEWVLSWKSKLPLQTIMRLLQVLVPQVEKICIDKGLTDESEILRFLQHGTLVGLLPVPHPILIRKYQANSGTAMWFRTYMWGVIYLRNVDPPVWYDTDVKLFEIQRV

SEQ ID NO: 341 - DNA, 3307 bp, Homo sapiens
gggccgcggagctggagccggagctgaagccggagccgggttggagtctgggcgggggccgggccggagcgggctccagagacatggggtcgaccgactccaagctgaacttccggaaggcggtgatccagctcaccaccaagacgcagcccgtggaagccaccgatgatgccttttgggaccagttctgggcagacacagccacctcggtgcaggatgtgtttgcactggtgccggcagcagagatccgggccgtgcgggaagagtcaccctccaacttggccaccctgtgctacaaggccgttgagaagctggtgcagggagctgagagtggctgccactcggagaaggagaagcagatcgtcctgaactgcagccggctgctcacccgcgtgctgccctacatctttgaggaccccgactggaggggcttcttctggtccacagtgcccggggcagggcgaggagggcagggagaagaggatgatgagcatgccaggcccctggccgagtccctgctcctggccattgctgacctgctcttctgcccggacttcacggttcagagccaccggaggagcactgtggactcggcagaggacgtccactccctggacagctgtgaatacatctgggaggctggtgtgggcttcgctcactccccccagcctaactacatccacgatatgaaccggatggagctgctgaaactgctgctgacatgcttctccgaggccatgtacctgcccccagctccggaaagtggcagcaccaacccatgggttcagttcttttgttccacggagaacagacatgccctgcccctcttcacctccctcctcaacaccgtgtgtgcctatgaccctgtgggctacgggatcccctacaaccacctgctcttctctgactaccgggaacccctggtggaggaggctgcccaggtgctcattgtcactttggaccacgacagtgccagcagtgccagccccactgtggacggcaccaccactggcaccgccatggatgatgccgatcctccaggccctgagaacctgtttgtgaactacctgtcccgcatccatcgtgaggaggacttccagttcatcctcaagggtatagcccggctgctgtccaaccccctgctccagacctacctgcctaactccaccaagaagatccagttccaccaggagctgctagttctcttctggaagctctgcgacttcaacaagaaattcctcttcttcgtgctgaagagcagcgacgtcctagacatccttgtccccatcctcttcttcctcaacgatgcccgggccgatcagtctcgggtgggcctgatgcacattggtgtcttcatcttgctgcttctgagcggggagcggaacttcggggtgcggctgaacaaaccctactcaatccgcgtgcccatggacatcccagtcttcacagggacccacgccgacctgctcattgtggtgttccacaagatcatcaccagcgggcaccagcggttgcagcccctcttcgactgcctgctcaccatcgtggtcaacgtgtccccctacctcaagagcctgtccatggtgaccgccaacaagttgctgcacctgctggaggccttctccaccacctggttcctcttctctgccgcccagaaccaccacctggtcttcttcctcctggaggtcttcaacaacatcatccagtaccagtttgatggcaactccaacctggtctacgccatcatccgcaagcgcagcatcttccaccagctggccaacctgcccacggacccgcccaccattcacaaggccctgcagcggcgccggcggacacctgagcccttgtctcgcaccggctcccaggagggcacctccatggagggctcccgccccgctgcccctgcagagccaggcaccctcaagaccagtctggtggctactccaggcattgacaagctgaccgagaagtcccaggtgtcagaggatggcaccttgcggtccctggaacctgagccccagcagagcttggaggatggcagcccggctaagggggagcccagccaggcatggagggagcagcggcgaccgtccacctcatcagccagtgggcagtggagcccaacgccagagtgggtcctctcctggaagtcgaagctgccgctgcagaccatcatgaggctgctgcaggtgctggttccgcaggtggagaagatctgcatcgacaagggcctgacggatgagtctgagatcctgcggttcctgcagcatggcaccctggtggggctgctgcccgtgccccaccccatcctcatccgcaagtaccaggccaactcgggcactgccatgtggttccgcacctacatgtggggcgtcatctatctgaggaatgtggacccccctgtctggtacgacaccgacgtgaagctgtttgagatacagcgggtgtgaggatgaagccgacgaggggctcagtctaggggaaggcagggccttggtccctgaggcttcccccatccaccattctgagctttaaattaccacgatcagggcctggaacaggccagagtggccctggagtgtcatgccctagagacccctgtggccaggacaatgtgaactggctcagatccccctcaacccctaggctggactcacaggagccccatctctggggctatgcccccaccagagaccactgcccccaacactcggactccctctttaagacctggctcagtgctggcccctcagtgcccacccactcctgtgctacccagccccagaggcagaagccaaaatgggtcactgtgccctaaggggtttgaccagggaaccacgggctgtcccttgaggtgcctggacagggtaagggggtgcttccagcctcctaacccaaagccagctgttccaggctccaggggaaaaaggtgtggccaggctgctcctcgaggaggctgggagctggccgactgcaaaagccagactggggcacctcccgtatccttggggcatggtgtggggtggtgagggtctcctgctatattctcctggatccgtggaaatagcctggctccctcttacccagtaatgaggggcagggaagggaactgggaggcagccgtttagtcctccctgccctgcccactgcctggatggggcgatgccacccctcatccttcacccaagctctggcctctgggtcccaccacccagccccccgtgtcagaacaatctttgctctgtacaatcggcctctttacaataaaacctcctgctccccaaaaaaaaaaaaaaaaaaaaaaaaa

SEQ ID NO: 342 - protein, 788 aa, Homo sapiens
MGSTDSKLNFRKAVIQLTTKTQPVEATDDAFWDQFWADTATSVQDVFALVPAAEIRAVREESPSNLATLCYKAVEKLVQGAESGCHSEKEKQIVLNCSRLLTRVLPYIFEDPDWRGFFWSTVPGAGRGGQGEEDDEHARPLAESLLLAIADLLFCPDFTVQSHRRSTVDSAEDVHSLDSCEYIWEAGVGFAHSPQPNYIHDMNRMELLKLLLTCFSEAMYLPPAPESGSTNPWVQFFCSTENRHALPLFTSLLNTVCAYDPVGYGIPYNHLLFSDYREPLVEEAAQVLIVTLDHDSASSASPTVDGTTTGTAMDDADPPGPENLFVNYLSRIHREEDFQFILKGIARLLSNPLLQTYLPNSTKKIQFHQELLVLFWKLCDFNKKFLFFVLKSSDVLDILVPILFFLNDARADQSRVGLMHIGVFILLLLSGERNFGVRLNKPYSIRVPMDIPVFTGTHADLLIVVFHKIITSGHQRLQPLFDCLLTIVVNVSPYLKSLSMVTANKLLHLLEAFSTTWFLFSAAQNHHLVFFLLEVFNNIIQYQFDGNSNLVYAIIRKRSIFHQLANLPTDPPTIHKALQRRRRTPEPLSRTGSQEGTSMEGSRPAAPAEPGTLKTSLVATPGIDKLTEKSQVSEDGTLRSLEPEPQQSLEDGSPAKGEPSQAWREQRRPSTSSASGQWSPTPEWVLSWKSKLPLQTIMRLLQVLVPQVEKICIDKGLTDESEILRFLQHGTLVGLLPVPHPILIRKYQANSGTAMWFRTYMWGVIYLRNVDPPVWYDTDVKLFEIQRV

SEQ ID NO: 343 - DNA, 563 bp, Homo sapiens
aggtacgcggggacagctggcattcagcctccagagcaccagcactggcactggcactggcacacgctatggcaaatgaagtgcaagacctgctctcccctcggaaagggggacatcctcctgcagtaaaagctggaggaatgagaatttccaaaaaacaagaaattggcaccttggaaagacataccaaaaaaacaggattcgagaaaacaagtgccattgcaaatgttgccaaaatacagacactggatgccctgaatgacgcactggagaagctcaactataaatttccagcaacagtgcacatggcgcatcaaaaacccacacctgctctggaaaaggttgttccactgaaaaggatctacattattcagcagcctcgaaaatgttaagcctggatttaaaacacagccgtctggccagctgcctcgaatatctgacagcttagcaaaaagggccaaagctttccataggcgtgctgcacttgcttggtaaattaagcagcttttgtatcttcccctttgactttaggtaataaagcatccaaacttgtaaaaaaaaaa

SEQ ID NO: 344 - protein, 107 aa, Homo sapiens
MANEVQDLLSPRKGGHPPAVKAGGMRISKKQEIGTLERHTKKTGFEKTSAIANVAKIQTLDALNDALEKLNYKFPATVHMAHQKPTPALEKVVPLKRIYIIQQPRKC

SEQ ID NO: 345 - DNA, 3733 bp, Homo sapiens
  misc_feature (1)...(3733): n = A,T,C or G
acgcgtccgggaaaccaggcactgcctgccggctttacatccgttgatctgacctgactggaagcgtccaaagagggacggctgtcagccctgcttgactgagaacccaccagctcatcccagacacctcatagcaacctatttatacaaagggggaaagaaacacctgagcagaatggaatcattatttttttcccaaggagaaaaccggggtaaagggagggaagcaattcaatttggagtccctgtgaatgggctttcagaaggcaattaaagaaatccactcagagaggacttggggtgaaacttgggtcctgtggttttctgattgtaagtggaagcaggtcttgcacacgctgttggcaaatgtcaggaccaggttaagtgactggcagaaaaacttccaggtggaacaagcaacccaggttctgctgcaagcttgaaggagcctggagcgggagaaagctaacttgaacatgacctgttgcatttggcaagttctagcaacatgctcctaaggaagcgatacaggcacagaccatgcagactccagttcctcctgctgctcctgatgctgggatgcgtcctgatgatggtggcgatgttgcaccctccccaccacaccctgcaccagactgtcacagcccaagccagcaagcacagccctgaagccaggtaccgcctggactttggggaatcccaggattgggtactggaagctgaggatgagggtgaagagtacagccctctggagggcctgccaccctttatctcactgcgggaggatcagctgctggtggccgtggccttaccccaggccagaaggaaccagagccagggcaggagaggtgggagctaccgcctcatcaagcagccaaggaggcaggataaggaagccccaaagagggactggggggctgatgaggacggggaggtgtctgaagaagaggagttgaccccgttcagcctggacccacgtggcctccaggaggcactcagtgcccgcatccccctccagagggctctgcccgaggtgcggcacccactgtgtctgcagcagcaccctcaggacagcctgcccacagccagcgtcatcctctgtttccatgatgaggcctggtccactctcctgcggactgtacacagcatcctcgacacagtgcccagggccttcctgaaggagatcatcctcgtggacgacctcagccagcaaggacaactcaagtctgctctcagcgaatatgtggccaggctggagggggtgaagttactcaggagcaacaagaggctgggtgccatcagggcccggatgctgggagccaccagagccaccggggatgtgctcgtcttcatggatgcccactgcgagtgccacccaggctggctggagcccctcctcagcagaatagctggtgacaggagccgagtggtatctccggtgatagatgtgattgactggaagactttccagtattacccctcaaaggacctgcagcgtggggtgttggactggaagctggatttccactgggaacctttgccagagcatgtgaggaaggccctccagtcccccataagccccatcaggagccctgtggtgcccggagaggtggtggccatggacagacattacttccaaaacactggagcgtatgactctcttatgtcgctgcgaggtggtgaaaacctcgaactgtctttcaaggcctggctctgtggtggctctgttgaaatccttccctgctctcgggtaggacacatctaccaaaatcaggattcccattcccccctcgaccaggaggccaccctgaggaacagggttcgcattgctgagacctggctggggtcattcaaagaaaccttctacaagcatagcccagaggccttctccttgagcaaggctgagaagccagactgcatggaacgcttgcagctgcaaaggagactgggttgtcggacattccactggtttctggctaatgtctaccctgagctgtacccatctgaacccaggcccagtttctctggaaagctccacaacactggacttgggctctgtgcagactgccaggcagaaggggacatcctgggctgtcccatggtgttggctccttgcagtgacagccggcagcaacagtacctgcagcacaccagcaggaaggagattcactttggcagcccacagcacctgtgctttgctgtcaggcaggagcaggtgattcttcagaactgcacggaggaaggcctggccatccaccagcagcactgggacttccaggagaatgggatgattgtccacattctttctgggaaatgcatggaagctgtggtgcaagaaaacaataaagatttgtacctgcgtccgtgtgatggaaaagcccgccagcagtggcgatttgaccagataaatgctgtggatgaacgatgaatgtcaatgtcagaaggaaaagagaattttggccatcaaaatccagctccaagtgaacttaaagagcttatatatttcatgaagctgatccttttgtgtgtgtgctcctggtgttaggagagaaaaaagctctatgaaagaatataggaagtttctccttttcacaccttatttcattgactgctggctgctttaaaaaaaaaaaaaaaaggatccattngtaccgttngtcttcatcactgggaaatgattattacatagtnacagaagattctttgtttttctccactgagcacttaacaattgnctttctctctggcctggacattctctggcagcacctccaggatacataaattcaatggatcaatttatttgtcttcaaatggccttaacttggattgtctgtttggccaaccatgaaaattaaagagtgtaagcagatgtaatggcctgacattccaaaaactctgaattgggtttattagcacaaatgttgtgttcatttgttgagccatatctcagaangaaggaaangggnagctacagaaanggaggtttaggattgcagagaangatgcaagnagcactttggcccaattctccnagctncaacccagcagctgaaaagcttcaagagatctaggaaaagacattttcatgttaatgagaatttccaccattgtagagaatttccttcctactgagaatctacctctattccccctgccctagctcttctctaacttggttaaccataaccataaccagattcccttgcaatcgatttctctttagtcgttggtgttagaagtaccagcacaatttgagcattcccattaacaaaggtgttcacagttgagaaactctcctgccgggcgcggtggctcatgcctgtaattccagcactttgggaggcagagttgggaggattacctgatgtcaggggtttgagaccagcctggtcaacattgcaaaaccttgtctctactaaaaatacaaaaattagctgggcatggtggcgcatacctgtratcccagctacttgggaggctgaggcaagagaatcgcttgaacccatgangcagaaggtgcaatnagctganatcatgccattgcacttcaacctgggngacagagtgggactncatctcaaaaaaaaaaaaaagagggaacctttctgggnccctgttacagggttgcactgctggagcanaacacacctttttnaaaaagcaaacctttttctggggaggnaaagccaaaactggnccaaantttttgacnggaaaatttgggggtaag

SEQ ID NO: 346 - protein, 639 aa, Homo sapiens
MLLRKRYRHRPCRLQFLLLLLMLGCVLMMVAMLHPPHHTLHQTVTAQASKHSPEARYRLDFGESQDWVLEAEDEGEEYSPLEGLPPFISLREDQLLVAVALPQARRNQSQGRRGGSYRLIKQPRRQDKEAPKRDWGADEDGEVSEEEELTPFSLDPRGLQEALSARIPLQRALPEVRHPLCLQQHPQDSLPTASVILCFHDEAWSTLLRTVHSILDTVPRAFLKEIILVDDLSQQGQLKSALSEYVARLEGVKLLRSNKRLGAIRARMLGATRATGDVLVFMDAHCECHPGWLEPLLSRIAGDRSRVVSPVIDVIDWKTFQYYPSKDLQRGVLDWKLDFHWEPLPEHVRKALQSPISPIRSPVVPGEVVAMDRHYFQNTGAYDSLMSLRGGENLELSFKAWLCGGSVEILPCSRVGHIYQNQDSHSPLDQEATLRNRVRIAETWLGSFKETFYKHSPEAFSLSKAEKPDCMERLQLQRRLGCRTFHWFLANVYPELYPSEPRPSFSGKLHNTGLGLCADCQAEGDILGCPMVLAPCSDSRQQQYLQHTSRKEIHFGSPQHLCFAVRQEQVILQNCTEEGLAIHQQHWDFQENGMIVHILSGKCMEAVVQENNKDLYLRPCDGKARQQWRFDQINAVDER

SEQ ID NO: 347 - DNA, 1891 bp, Homo sapiens
  misc_feature (1)...(1891): n = A,T,C or G
gagtcaccaaggaaggcagcggcagctccactcagccagtacccagatacgctgggaaccttccccagccatggcttccctggggcagatcctcttctggagcataattagcatcatcattattctggctggagcaattgcactcatcattggctttggtatttcagggagacactccatcacagtcactactgtcgcctcagctgggaacattggggaggatggaatcctgagctgcacttttgaacctgacatcaaactttctgatatcgtgatacaatggctgaaggaaggtgttttaggcttggtccatgagttcaaagaaggcaaagatgagctgtcggagcaggatgaaatgttcagaggccggacagcagtgtttgctgatcaagtgatagttggcaatgcctctttgcggctgaaaaacgtgcaactcacagatgctggcacctacaaatgttatatcatcacttctaaaggcaaggggaatgctaaccttgagtataaaactggagccttcagcatgccggaagtgaatgtggactataatgccagctcagagaccttgcggtgtgaggctccccgatggttcccccagcccacagtggtctgggcatcccaagttgaccagggagccaacttctcggaagtctccaataccagctttgagctgaactctgagaatgtgaccatgaaggttgtgtctgtgctctacaatgttacgatcaacaacacatactcctgtatgattgaaaatgacattgccaaagcaacaggggatatcaaagtgacagaatcggagatcaaaaggcggagtcacctacagctgctaaactcaaaggcttctctgtgtgtctcttctttctttgccatcagctgggcacttctgcctctcagcccttacctgatgctaaaataatgtgcctcggccacaaaaaagcatgcaaagtcattgttacaacagggatctacagaactatttcaccaccagatatgacctagttttatatttctgggaggaaatgaattcatatctagaagtctggagtgagcaaacaagagcaagaaacaaaaagaagccaaaagcagawrkctscarwatkmccccttagcgtggtcgcssccssaggtacaggacgtctccccattacaactacccaatccgaagtgtcaactgtgtcaggactaagaaaccctggttttgagtagaaaagggcctggaaagaggggagccaacaaatctgtctgcttcctcacattagtcattggcaaataagcattctgtctctttggctgctgcctcagcacagagagccagaactctatcgggcaccaggataacatctctcagtgaacangagttgacaaggcctatgggaaatgcctgatgggattatcttcagcttgttgagcttctaagtttctttcccttcattctaccctgcaagccaagttctgtaagagaaatgcctgagttctagctcaggttttcttactctgaatttagatctccagacccttcctggccacaattcaaattaaggcaacaaacatataccttccatgaangcacacacagacttttgaaagcaaggacaatgactgcttgaattgaggccttganggaatgaangcntttgaaggnaaaagaantactttngtttccagcccccnttncccacactncttcatgtgttaanccactgcncttncctggannccttggnangcccacggntgnactgntattnacatngttgttnnatagaaaanncntgattttaganngttnctgnatcgnttcnaagnagaatgnattwaaaatatacyattttccbaaaaaaaaaaaaaaaaaaaaaamaaagtacctcggccgcgaccacgctaaggg

SEQ ID NO: 348 - protein, 282 aa, Homo sapiens
MASLGQILFWSIISIIIILAGAIALIIGFGISGRHSITVTTVASAGNIGEDGILSCTFEPDIKLSDIVIQWLKEGVLGLVHEFKEGKDELSEQDEMFRGRTAVFADQVIVGNASLRLKNVQLTDAGTYKCYIITSKGKGNANLEYKTGAFSMPEVNVDYNASSETLRCEAPRWFPQPTVVWASQVDQGANFSEVSNTSFELNSENVTMKVVSVLYNVTINNTYSCMIENDIAKATGDIKVTESEIKRRSHLQLLNSKASLCVSSFFAISWALLPLSPYLMLK

SEQ ID NO: 349 - DNA, 1517 bp, Homo sapiens
  misc_feature (1)...(1517): n = A,T,C or G
ttagggagtcgacccacgcgtccggcccggacgcggaagaactggcccagcggaggttcccgcttctgaagcgtgggaggcggaagagactgcagcccccgcccccgtccccaagcctccgccccttagcccccgcccccagctgccagtccccagcagctcagtcctgcagtgagagtcttgggagtccatagctaagcaccaggagctgagcactgcccgctgtgcctgcctgcaagtctgacatggctcaggagaaaatggagctggaccttgagcctgacacatcttatgggggaaccctgaggagatccagcagcgctcccctaatccatgggctcagtgacctttcacaggttttccaaccttacacacttagaactcggaggaatagtacaacaattatgagccgtcacagcctggaagaaggcctggatatggtgaacagagaaactgcacatgaaagggaaatgcaaacggcaatgcagataagccaatcatgggatgagagcttgagcctgagtgacagtgattttgacaagccggagaaattatattctcctaagagaattgacttcactccagtttctccagcaccttcacccaccaggggattcggaaagatgttcgtgagcagcagtggattgccaccaagtccagttcccagtccaagacgattttcaagcaggagaagtcagagtccagtcaagtgcattagacccagtgttcttggtcctcttaaaagaaaaggtgaaatggagacagaaagtcagcccaagagactcttccaaggcactaccaatatgttatctccagatgccgcgcaactgtctgatctcagttcatgttcagatattttggatggcagtagtagcagcagtggcttatcctcagacccgctggctaaaggcagcgctaccgcagagtctccagtagcatgctccaattcatgctcttcgttcatcttgatggatgatctctcacccaagtgacttaaccatttctgattcaacgttttaactgctgtttcctacataaaatgtttagtggggaacgcagagaactttgatccataatgaggattaaagttttacagatttcacacattctgatgctattattactctttggcatctctcttctccaaagttcaattttgtgagcctagtgaccttactagtatctggttttgctgatctcattttggatttagtgattaaatctcaaatgctgatttttgattgcttagaggaatcttttttcttagtgcctcaaaaaacacctattttgagtctatacatttaagaaaggcactgatgtgtattgcctttaatgggtccttttccgcagcaagtgatatgacagatttgatcagaaattctcttgcttgagagatttttttttgtcctctgttgactacatagtttcaaatctctctttatttcatgatgatatataaattgcttttaattatatnaaattttattttctggatcagcttcaagaccattattttg

SEQ ID NO: 350 - protein, 243 aa, Homo sapiens
  VARIANT (1)...(243): Xaa = Any Amino Acid
MAQEKMELDLEPDTSYGGTLRRSSSAPLIHGLSDLSQVFQPYTLRTRRNSTTIMSRHSLEEGLDMVNRETAHEREMQTAMQISQSWDESLSLSDSDFDKPEKLYSPKRIDFTPVSPAPSPTRGFGKMFVSSSGLPPSPVPSPRRFSSRRSQSPVKCIRPSVLGPLKRKGEMETESQPKRLFQGTTNMLSPDAAQLSDLSSCSDILDGSSSSSGLSSDPLAXXQRYRRVSSSMLQFMLFVHLDG

SEQ ID NO: 351 - protein, 248 aa, Homo sapiens
MAQEKMELDLEPDTSYGGTLRRSSSAPLIHGLSDLSQVFQPYTLRTRRNSTTIMSRHSLEEGLDMVNRETAHEREMQTAMQISQSWDESLSLSDSDFDKPEKLYSPKRIDFTPVSPAPSPTRGFGKMFVSSSGLPPSPVPSPRRFSSRRSQSPVKCIRPSVLGPLKRKGEMETESQPKRLFQGTTNMLSPDAAQLSDLSSCSDILDGSSSSSGLSSDPLAKGSATAESPVACSNSCSSFILMDDLSPK

SEQ ID NO: 352 - DNA, 1529 bp, Homo sapiens
  misc_feature (1)...(1529): n = A,T,C or G
ttagggagtcgacccacgcgtccggcccggacgcggaagaactggcccagcggaggttcccgcttctgaagcgtgggaggcggaagagactgcagcccccgcccccgtccccaagcctccgccccttagcccccgcccccagctgccagtccccagcagctcagtcctgcagtgagagtcttgggagtccatagctaagcaccaggagctgagcactgcccgctgtgcctgcctgcaagtctgacatggctcaggagaaaatggagctggaccttgagcctgacacatcttatgggggaaccctgaggagatccagcagcgctcccctaatccatgggctcagtgacctttcacaggttttccaaccttacacacttagaactcggaggaatagtacaacaattatgagccgtcacagcctggtaagtatagaagaagaaggcctggatatggtgaacagagaaactgcacatgaaagggaaatgcaaacggcaatgcagataagccaatcatgggatgagagcttgagcctgagtgacagtgattttgacaagccggagaaattatattctcctaagagaattgacttcactccagtttctccagcaccttcacccaccaggggattcggaaagatgttcgtgagcagcagtggattgccaccaagtccagttcccagtccaagacgattttcaagcaggagaagtcagagtccagtcaagtgcattagacccagtgttcttggtcctcttaaaagaaaaggtgaaatggagacagaaagtcagcccaagagactcttccaaggcactaccaatatgttatctccagatgccgcgcaactgtctgatctcagttcatgttcagatattttggatggcagtagtagcagcagtggcttatcctcagacccgctggctaaaggcagcgctaccgcagagtctccagtagcatgctccaattcatgctcttcgttcatcttgatggatgatctctcacccaagtgacttaaccatttctgattcaacgttttaactgctgtttcctacataaaatgtttagtggggaacgcagagaactttgatccataatgaggattaaagttttacagatttcacacattctgatgctattattactctttggcatctctcttctccaaagttcaattttgtgagcctagtgaccttactagtatctggttttgctgatctcattttggatttagtgattaaatctcaaatgctgatttttgattgcttagaggaatcttttttcttagtgcctcaaaaaacacctattttgagtctatacatttaagaaaggcactgatgtgtattgcctttaatgggtccttttccgcagcaagtgatatgacagatttgatcagaaattctcttgcttgagagatttttttttgtcctctgttgactacatagtttcaaatctctctttatttcatgatgatatataaattgcttttaattatatnaaattttattttctggatcagcttcaagaccattattttg

SEQ ID NO: 353 - protein, 252 aa, Homo sapiens
MAQEKMELDLEPDTSYGGTLRRSSSAPLIHGLSDLSQVFQPYTLRTRRNSTTIMSRHSLVSIEEEGLDMVNRETAHEREMQTAMQISQSWDESLSLSDSDFDKPEKLYSPKRIDFTPVSPAPSPTRGFGKMFVSSSGLPPSPVPSPRRFSSRRSQSPVKCIRPSVLGPLKRKGEMETESQPKRLFQGTTNMLSPDAAQLSDLSSCSDILDGSSSSSGLSSDPLAKGSATAESPVACSNSCSSFILMDDLSPK

SEQ ID NO: 354 - DNA, 1574 bp, Homo sapiens
  misc_feature (1)...(1574): n = A,T,C or G
ttagggagtcgacccacgcgtccggcccggacgcggaagaactggcccagcggaggttcccgcttctgaagcgtgggaggcggaagagactgcagcccccgcccccgtccccaagcctccgccccttagcccccgcccccagctgccagtccccagcagctcagtcctgcagtgagagtcttgggagtccatagctaagcaccaggagctgagcactgcccgctgtgcctgcctgcaagtctgacatggctcaggagaaaatggagctggaccttgagcctgacacatcttatgggggaaccctgaggagatccagcagcgctcccctaatccatgggctcagtgacctttcacaggttttccaaccttacacacttagaactcggaggaatagtacaacaattatgagccgtcacagcctgttgctgtcatcctcacctaatcgtattcctagtagcagactgcatcagatcaaaagggaagaaggcctggatatggtgaacagagaaactgcacatgaaagggaaatgcaaacggcaatgcagataagccaatcatgggatgagagcttgagcctgagtgacagtgattttgacaagccggagaaattatattctcctaagagaattgacttcactccagtttctccagcaccttcacccaccaggggattcggaaagatgttcgtgagcagcagtggattgccaccaagtccagttcccagtccaagacgattttcaagcaggagaagtcagagtccagtcaagtgcattagacccagtgttcttggtcctcttaaaagaaaaggtgaaatggagacagaaagtcagcccaagagactcttccaaggcactaccaatatgttatctccagatgccgcgcaactgtctgatctcagttcatgttcagatattttggatggcagtagtagcagcagtggcttatcctcagacccgctggctaaaggcagcgctaccgcagagtctccagtagcatgctccaattcatgctcttcgttcatcttgatggatgatctctcacccaagtgacttaaccatttctgattcaacgttttaactgctgtttcctacataaaatgtttagtggggaacgcagagaactttgatccataatgaggattaaagttttacagatttcacacattctgatgctattattactctttggcatctctcttctccaaagttcaattttgtgagcctagtgaccttactagtatctggttttgctgatctcattttggatttagtgattaaatctcaaatgctgatttttgattgcttagaggaatcttttttcttagtgcctcaaaaaacacctattttgagtctatacatttaagaaaggcactgatgtgtattgcctttaatgggtccttttccgcagcaagtgatatgacagatttgatcagaaattctcttgcttgagagatttttttttgtcctctgttgactacatagtttcaaatctctctttatttcatgatgatatataaattgcttttaattatatnaaattttattttctggatcagcttcaagaccattattttg

SEQ ID NO: 355 - protein, 267 aa, Homo sapiens
MAQEKMELDLEPDTSYGGTLRRSSSAPLIHGLSDLSQVFQPYTLRTRRNSTTIMSRHSLLLSSSPNRIPSSRLHQIKREEGLDMVNRETAHEREMQTAMQISQSWDESLSLSDSDFDKPEKLYSPKRIDFTPVSPAPSPTRGFGKMFVSSSGLPPSPVPSPRRFSSRRSQSPVKCIRPSVLGPLKRKGEMETESQPKRLFQGTTNMLSPDAAQLSDLSSCSDILDGSSSSSGLSSDPLAKGSATAESPVACSNSCSSFILMDDLSPK

SEQ ID NO: 356 - DNA, 4458 bp, Homo sapiens
gtcgacccacgcgtccggcgatgcctcgctggcttctgctttcattgacctttgcgggtctgttcccgctgcggcgccggcagctgcttggtagttgcggggggcgtgagggcggtggcccagaccaaccggctggcagcccagctccgctccgcccgcccctgcctcggaccctgcgcctgaggaagtatcgaggcaaccctctgccacccgaagttcgtgggtcgctcccagagggcgcgccctggagccgagcgcccttgggcggccatctggaggccaggtgcgggccgcgaacccgcgaggagcgcgcggcgggcgcggcggcgacggcaggaggaggggccgggagcccgggcgccgccgaaggacgccccgtcctccacatgctgccacttggctgagccgggcgccggcgagaaggcggcgccgctgccctggcagctggactgcactttgcccccgcccggcctcagctgccgcccgcccagacgccagcaagcccccctcccacgacagggctgctccgggagcttcggagacccgccccgggcctgagcgcaggctgcctccgggaccccacggctgtccggacgtgccatgggcgcgcagctgccgggcaacgtgttgtgtaagtgaacatctgggaggtaaacactacacgtgaagagtggtgaaagggaacattgattactgaagtgccctggagagggaaagcactggtcaacatcacatggacaaatttcattgttttctaaagatggcctggaagtagtctttgccactgcttcctccacaaacagctcttcataacatgggctgcatgaaatcaaagcaaactttcccatttcctaccatatatgaaggtgagaagcagcatgagagtgaagaaccctttatgccagaagagagatgtctacctaggatggcttctccagttaatgtcaaagaggaagtgaaggaacctccagggaccaatattgtgatcttggaatatgcacaccgcctgtctcaggatatcttgtgtgatgccttgcagcaatgggcatgcaataacatcaagtaccatgacattccatacattgagagtgaggggccttgaggctgtaggatgacaacactttgactgtggaggtgctagtttgaataaatgtgacaaaagcaaaaactggtgtgaaaaagtacaaataactatctggatttaaaaatgtgtctacgataatgtcactattataagaacaactaggatgaaatgcattttaagtacttctatgttaacagcaatttctgtttagtcttagattttagtcatctgaagggctgaacagaggtcctgtgacacccaataatcagctgaatgtcacagcacttcttcctaagtaatggcatcaccaaagaaaatgctaaggaataaaaactgccccaaattccaatggttgaagtttatcctttaaaataacaatttttgtttatacccaaaaaaagtccagatatgaaaagggcttttctaaaatttcttggcgagggaatggcactcaaatcatagtgattaacagtaagtcttgtttgtttgtcaaggatctctacttcttgacacaaatgaaccctgtctttaataagataagatatttatttttgtagatgagaagtgtaactaccaccttggacctcagggccctaactaattacagctgttactggacgactcagactttgtgcctaaagccatcttagagataacagtttatagaagccatgacattagtgtttattgcattgaattaagcccagtgatataactatacaagaaaacaagtatgggtaccttttacaaagagcaatccaataaatcttaaaaataacagaaacttagtctgcaaggtagaaagtttcagttttaattctgtattaagctttactatctcagaggtacagagggctggaatatgggcatttatttccagttttttcttgactagtaaggcggtcaccattaaaatagaccagatgataatgcatgaagatttacagttgtattgcaaaacggaaaagataaaactgtcctttgaggagagtactcgttttctgggtttttgttattttttagtggtaacacaagcctatagggcatttatagccacctattatactgtttccataagcctggctaccttttagggaagctattttttctctttcatttttactgtcacagcacatacacacacacctttttgttttaaaggattaagtactgtttgaagatcagtggtaacagaaaatttgggagggagaagaagaaattaagacatgacttgttagaaaattaagacttcagtttctagaattatcttttcatcaagatttggtagacattgagtttaaatggaaaggaaattatttaagcctgtgtatgttagatccacaatacaccattggtattgaaatataaaggttaaaaaaaaggcttatgacctctttaatgagataaatatgtatttgtcttgtaagcaggcagaaaatctacctctaattttaacactaatactttgaaacccacaatcaaatagagtgaattctccaagttacataagcaaggaaaacattatttgaaatatgccatgttttcgttgcctttggacacctcatcattcaactctaattttaccgagtcccgggatttgtactgtcccattgtacttgcaatctacaatttatataatagaaaaacaaccaaacccattcatacaaggatctgaagttataaggttaagggcagaaagtttcccataagtataaaacatttccaggtcatgaagagtagtttaggttgagtgacaaaagcctaggtgtggttgtttttcattcattttgcatctcacaccaagacatttttgctgcaaggtcatctgctgcttaaaatgtacaattaggtatataaaataagtacaatggtgaaaacacaaagccaggtaaagcagcatgccccactaaatttttcagtatacatagggacagacaagtgagttttggttgtatctaaatattttaatttcaggttccttctgtgccctgggccactatttcccaggggtgtgacagagatgcctgccagatccatatcaactagaagtctgatttctgttgctgcccttcctcagcaactatggcagtatacttttatcaccaagcaccactcccttgtccctgaatcacattttaatagagtacaatatcttctgtacaatatttctgaaacacttatgtctgaaatatatgctgtattgtatgttaacccatgacatatatgaactacaaggcttgcataatcagtgagctagtggataaatcaagacaggagcaaatgggagaaagatgaataaacaaatgaaaaaagatgaataaatgaataagagagatgaataaacaaatttacattacatgtgatagttatcatggtatggccttcatgacaagatggatgagaatatcactgataggatattagccttctttcatatctttatattgaaatatgggctttacttcaatttgaaggtctttcatgaacaataaaagagagtagaaggactgtctgagaaggcaggagacatataaaacagatgactgaaagactgactagctcctggaaagggaaacatttggaacatccagagtaaggcaaatgggcttctaccagcacaacaaagagcctccaggtggcaacatggaagcaggttatcagagaaaataaatgtgcaaattccttatttacaatgactcacttaaccccacaaacatgtttcactgctgccttccccagttgtcgcttatgtactgttgttacctttcagttacatgcctttgatcctaaaattctctacttttgttgccttatcagttctttgcaatctgcctgtggttatcagcacttaaagcacaattttgaaggggaaaaaaatgataatcaccttagtcccaaagaaataatttgtcaaactgccttattagtattaaaaacagacacactgaatgaagtagcatgatacgcatatatcctactcagtatcattggccttttatcaaatggggaaactatacttttgtattacatagttttagaaatcgaaagttagagactctttataagtaatgtcaaggaacagtaatttaaaaacaaagttctaacaaatatattgtttgcttaatcacaatgccctcaacttgtatttgaataactaaataggacatgtcttccttggagctgtgggcattagttcagaagcactacctgcatcttaattttcaaaacttaagttttattagcaaatcctcttctctgtaagacttagctatgaagtggtatattttttccaaatatttttctgaaaacatttgttgttgtaactgcacaataaaagtccagttgcaattaaaaaaaaaaaaaaaaaaaaaaaa

SEQ ID NO: 357 - protein, 127 aa, Homo sapiens
MPRWLLLSLTFAGLFPLRRRQLLGSCGGREGGGPDQPAGSPAPLRPPLPRTLRLRKYRGNPLPPEVRGSLPEGAPWSRAPLGGHLEARCGPRTREERAAGAAATAGGGAGSPGAAEGRPVLHMLPLG

SEQ ID NO: 358 - DNA, 1168 bp, Homo sapiens
gtcgacccacgcgtccggcgatgcctcgctggcttctgctttcattgacctttgcgggtctgttcccgctgcggcgccggcagctgcttggtagttgcggggggcgtgagggcggtggcccagaccaaccggctggcagcccagctccgctccgcccgcccctgcctcggaccctgcgcctgaggaagtatcgaggcaaccctctgccacccgaagttcgtgggtcgctcccagagggcgcgccctggagccgagcgcccttgggcggccatctggaggccaggtgcgggccgcgaacccgcgaggagcgcgcggcgggcgcggcggcgacggcaggaggaggggccgggagcccgggcgccgccgaaggacgccccgtcctccacatgctgccacttggctgagccgggcgccggcgagaaggcggcgccgctgccctggcagctggactgcactttgcccccgcccggcctcagctgccgcccgcccagacgccagcaagcccccctcccacgacagggctgctccgggagcttcggagacccgccccgggcctgagcgcaggctgcctccgggaccccacggctgtccggacgtgccatgggcgcgcagctgccgggcaacgtgttgtgtaagtgaacatctgggaggtaaacactacacgtgaagagtggtgaaagggaacattgattactgaagtgccctggagagggaaagcactggtcaacatcacatggacaaatttcattgttttctaaagatggcctggaagtagtctttgccactgcttcctccacaaacagctcttcataacatgggctgcatgaaatcaaagcaaactttcccatttcctaccatatatgaaggtgagaagcagcatgagagtgaagaaccctttatgccagaagagagatgtctacctaggatggcttctccagttaatgtcaaagaggaagtgaaggaacctccagggaccaatattgtgatcttggaatatgcacaccgcctgtctcaggatatcttgtgtgatgccttgcagcaatgggcatgcaataacatcaagtaccatgacattccatacattgagagtgaggggccttgaggctgtaggatgacaacactttgactgtggaggtgctagtttgaataaatgtgacaaaagcaaaaa

SEQ ID NO: 359 - DNA, 4458 bp, Homo sapiens; identical to SEQ ID NO: 356

SEQ ID NO: 360 - DNA, 583 bp, Homo sapiens
cccctgcaccccgcccggcatagcaccatgcctgcttgtcgcctaggcccgctagccgccgccctcctcctcagcctgctgctgttcggcttcaccctagtctcaggcacaggagcagagaagactggcgtgtgccccgagctccaggctgaccagaactgcacgcaagagtgcgtctcggacagcgaatgcgccgacaacctcaagtgctgcagcgcgggctgtgccaccttctgccttctctgccccaatgataaggagggttcctgcccccaggtgaacattaactttccccagctcggcctctgtcgggaccagtgccaggtggacacgcagtgtcctggccagatgaaatgctgccgcaatggctgtgggaaggtgtcctgtgtcactcccaatttctgaggtccagccaccaccaggctgagcagtgaggagagaaagtttctgcctggccctgcatctggttccagcccacctgccctcccctttttcgggactctgtattccctcttggggtgaccacagcttctccctttcccaaccaataaagtaaccactttcagcaaaaaaaaaaaaaaaa

SEQ ID NO: 361 - protein, 125 aa, Homo sapiens [sequence omitted]

SEQ ID NO: 362 - DNA, 3310 bp, Homo sapiens
ggcgggcgaccaaagcgcctgaggaccggcaacatggtgcggtcggggaataaggcagctgttgtgctgtgtatggacgtgggctttaccatgagtaactccattcctggtatagaatccccatttgaacaagcaaagaaggtgataaccatgtttgtacagcgacaggtgtttgctgagaacaaggatgagattgctttagtcctgtttggtacagatggcactgacaatcccctttctggtggggatcagtatcagaacatcacagtgcacagacatctgatgctaccagattttgatttgctggaggacattgaaagcaaaatccaaccaggttctcaacaggctgacttcctggatgcactaatcgtgagcatggatgtgattcaacatgaaacaataggaaagaagtttgagaagaggcatattgaaatattcactgacctcagcagccgattcagcaaaagtcagctggatattataattcatagcttgaagaaatgtgacatctccctgcaattcttcttgcctttctcacttggcaaggaagatggaagtggggacagaggagatggcccctttcgcttaggtggccatgggccttcctttccactaaaaggaattaccgaacagcaaaaagaaggtcttgagatagtgaaaatggtgatgatatctttagaaggtgaagatgggttggatgaaatttattcattcagtgagagtctgagaaaactgtgcgtcttcaagaaaattgagaggcattccattcactggccctgccgactgaccattggctccaatttgtctataaggattgcagcctataaatcgattctacaggagagagttaaaaagacttggacagttgtggatgcaaaaaccctaaaaaaagaagatatacaaaaagaaacagtttattgcttaaatgatgatgatgaaactgaagttttaaaagaggatattattcaagggttccgctatggaagtgatatagttcctttctctaaagtggatgaggaacaaatgaaatataaatcggaggggaagtgcttctctgttttgggattttgtaaatcttctcaggttcagagaagattcttcatgggaaatcaagttctaaaggtctttgcagcaagagatgatgaggcagctgcagttgcactttcctccctgattcatgctttggatgacttagacatggtggccatagttcgatatgcttatgacaaaagagctaatcctcaagtcggcgtggcttttcctcatatcaagcataactatgagtgtttagtgtatgtgcagctgcctttcatggaagacttgcggcaatacatgttttcatccttgaaaaacagtaagaaatatgctcccaccgaggcacagttgaatgctgttgatgctttgattgactccatgagcttggcaaagaaagatgagaagacagacacccttgaagacttgtttccaaccaccaaaatcccaaatcctcgatttcagagattatttcagtgtctgctgcacagagctttacatccccgggagcctctacccccaattcagcagcatatttggaatatgctgaatcctcccgctgaggtgacaacaaaaagtcagattcctctctctaaaataaagaccctttttcctctgattgaagccaagaaaaaggatcaagtgactgctcaggaaattttccaagacaaccatgaagatggacctacagctaaaaaattaaagactgagcaagggggagcccacttcagcgtctccagtctggctgaaggcagtgtcacctctgttggaagtgtgaatcctgctgaaaacttccgtgttctagtgaaacagaagaaggccagctttgaggaagcgagtaaccagctcataaatcacatcgaacagtttttggatactaatgaaacaccgtattttatgaagagcatagactgcatccgagccttccgggaagaagccattaagttttcagaagagcagcgctttaacaacttcctgaaagcccttcaagagaaagtggaaattaaacaattaaatcatttctgggaaattgttgtccaggatggaattactctgatcaccaaagaggaagcctctggaagttctgtcacagctgaggaagccaaaaagtttctggcccccaaagacaaaccaagtggagacacagcagctgtatttgaagaaggtggtgatgtggacgatttattggacatgatataggtcgtggatgtatggggaatctaagagagctgccatcgctgtgatgctgggagttctaacaaaacaagttggatgcggccattcaaggggagccaaaatctcaagaaattcccagcaggttacctggaggcggatcatctaattctctgtggaatgaatacacacatatatattacaagggataatttagaccccatacaagtttataaagagtcattgttattttctggttggtgtattattttttctgtggtcttactgatctttgtatattacatacatgctttgaagtttctggaaagtagatcttttcttgacctagtatatcagtgacagttgcagcccttgtgatgtgattagtgtctcatgtggaaccatggcatggttattgatgagtttcttaaccctttccagagtcctcctttgcctgatcctccaacagctgtcacaacttgtgttgagcaagcagtagcatttgcttcctcccaacaagcagctgggttaggaaaaccatgggtaaggacggactcacttctctttttagttgaggccttctagttaccacattactctgcctctgtatataggtggttttctttaagtggggtgggaaggggagcacaatttcccttcatactccttttaagcagtgagttatggtggtggtctcatgaagaaaagaccttttggcccaatctctgccatatcagtgaacctttagaaactcaaaaactgagaaatttacttcagtagttagaattatatcacttcactgttctctacttgcaagcctcaaagagagaaagtttcgttatattaaaacacttaggtaacttttcggtctttcccatttctacctaagtcagctttcatctttgtggatggtgtctcctttactaaataagaaaataacaaagcccttattctctttttttcttgtcctcattcttgccttgagttccagttcctctttggtgtacagacttcttggtacccagtcacctctgtcttcagcaccctcataagtcgtcactaatacacagttttgtacatgtaacattaaaggcataaatgactc

SEQ ID NO: 363 - protein, 732 aa, Homo sapiens
MVRSGNKAAVVLCMDVGFTMSNSIPGIESPFEQAKKVITMFVQRQVFAENKDEIALVLFGTDGTDNPLSGGDQYQNITVHRHLMLPDFDLLEDIESKIQPGSQQADFLDALIVSMDVIQHETIGKKFEKRHIEIFTDLSSRFSKSQLDIIIHSLKKCDISLQFFLPFSLGKEDGSGDRGDGPFRLGGHGPSFPLKGITEQQKEGLEIVKMVMISLEGEDGLDEIYSFSESLRKLCVFKKIERHSIHWPCRLTIGSNLSIRIAAYKSILQERVKKTWTVVDAKTLKKEDIQKETVYCLNDDDETEVLKEDIIQGFRYGSDIVPFSKVDEEQMKYKSEGKCFSVLGFCKSSQVQRRFFMGNQVLKVFAARDDEAAAVALSSLIHALDDLDMVAIVRYAYDKRANPQVGVAFPHIKHNYECLVYVQLPFMEDLRQYMFSSLKNSKKYAPTEAQLNAVDALIDSMSLAKKDEKTDTLEDLFPTTKIPNPRFQRLFQCLLHRALHPREPLPPIQQHIWNMLNPPAEVTTKSQIPLSKIKTLFPLIEAKKKDQVTAQEIFQDNHEDGPTAKKLKTEQGGAHFSVSSLAEGSVTSVGSVNPAENFRVLVKQKKASFEEASNQLINHIEQFLDTNETPYFMKSIDCIRAFREEAIKFSEEQRFNNFLKALQEKVEIKQLNHFWEIVVQDGITLITKEEASGSSVTAEEAKKFLAPKDKPSGDTAAVFEEGGDVDDLLDMI
